United States Patent Application Publication US 2024/0263153 A1 - sequence listing, part 7

SEQ ID NO: 30565 - DNA, 260 bp, Unknown
  Description of Unknown: RightRegion for integrase B4566 sequence
agccttgtgtttgagcttaggtgcggtataaaactgagggaggaaattatatggaactgagaacgcttctttacggatataataaacatctatttcggtttttaattaacgaaacggaaagtgcggttgtaagaggtatttttgatgagtacataagcggcggaacattacagaaaatcgccgaccgcttaactgccgaaaacaccgtatattacaaagataaaacagtttggaataagcatatggtgcgacgcatcctt

SEQ ID NO: 30566 - DNA, 109 bp, Unknown
  Description of Unknown: RightRegion for integrase B4567 sequence
cctttttattgtttacagataccgcggagaatcgaactctgtgcagggcgcgagcgttaagcaaacgcggagcgcttgtagcgagcgggcgaggacgccgacaggcggc

SEQ ID NO: 30567 - DNA, 260 bp, Unknown
  Description of Unknown: RightRegion for integrase B4568 sequence
ttgctgagtagtgtcttgttcacaaacgctgatgatgtaaaagtctattataagatgtaaactatattgacattttcaccgtattgtatatattatattaacaaaaagccctgttttatgggctttttgttgtacttcatactgcgtctagtgtatcaacattagacgcagtatgaagtacaatttttaattcgtatattgcaaacgaattttacatatgatataatgccgtcaggcaaaacaatagaataagtccgtat

SEQ ID NO: 30568 - DNA, 260 bp, Unknown
  Description of Unknown: RightRegion for integrase B4569 sequence
ttggacttcctgcaaatgacgatttacccccgcgtaccggcgggggaaatacagggatagcatcccgtgtaaaacgaatttttctcactcccacttttcccccagtcgagttgcgcgtttgagaatgtcggcggcgaagcggcaggggcgaccaccgtctttaacggcaagacggccgcctgccccggcacgcagcccacgggcggctgctgcggccgcgtttcgacctgctcgaactgcggcaccacctgccagtgctc

SEQ ID NO: 30569 - DNA, 109 bp, Unknown
  Description of Unknown: RightRegion for integrase B4570 sequence
cgtaaaaaagaatggacaaaaattgatcagtttgtcattcagctttatcctaagatataataaaaccgttggtgcaccaacggtttttcttgtgtatatggtttgatgt

SEQ ID NO: 30570 - DNA, 260 bp, Unknown
  Description of Unknown: RightRegion for integrase B4571 sequence
ctggataaacttctacaaattattactcgcatgaaagtgagggaactatatgctgcctgaatcaaatgaattcccaataatccaaattgaaattgccaaaataaaatttcttaacccgcgaactagaaataaggtagtgcatgaagaaattaaggaaagcataaaaaaaagagggttaagcaagcctataagcgtaagagcgattgatgaagacgacttcaaatatgctttaatttgtggccaagggagaatagaggcgc

SEQ ID NO: 30571 - DNA, 260 bp, Unknown
  Description of Unknown: RightRegion for integrase B4572 sequence
ggagataaagacaatcccacttttacattaaatctcaagccccgaatcccgcgtatttaggggcttttctattagcgacaacatttttggactcacgaacgggcacaaaaacgttatcgctatttttttcttcctattataatgtggaattatacactatcatacacacttctttccaccataatatgcaaatactacagtcccagtaaagctctccatgtgttctgtccaacaatgccgtcagttgtaagtccatgcgc

SEQ ID NO: 30572 - DNA, 260 bp, Unknown
  Description of Unknown: RightRegion for integrase B4573 sequence
agcgacctccatctgacaatccaccccaaaattgctatacctcaaacctctaacatttaagttattgctgctgcgcgctgcatgaagtaccccgttcaatctgctcgtgcttcggcggtgacgatctcgtgctcagcaacgatggctatcagctgttcgtaaccctcggtcagttctcgatcatccgacttgagcgcgacattcagctgctcatgcccgcttacgacgtatgtctgccgcggcgcgactgctcgaacagc

SEQ ID NO: 30573 - DNA, 260 bp, Unknown; identical to SEQ ID NO: 30546
  Description of Unknown: RightRegion for integrase B4574 sequence

SEQ ID NO: 30574 - DNA, 260 bp, Unknown
  Description of Unknown: RightRegion for integrase B4575 sequence
ataaatccttctgataaagatgattttaaattaaagctatttcctaaaatacaagcatagattatttttttagtctatgcttgtaacattaatatcttgatttatcaaaatgtacccatgtaggtgttacagaaattggctcaacatatgaccacactcctgaatttcttgctgaattccataattgtcttcttcgtgtatctgataatgtttggcctacatcaaatgcggttccggcataatgttgactttgattaccg

SEQ ID NO: 30575 - DNA, 260 bp, Unknown
  Description of Unknown: RightRegion for integrase B4576 sequence
tccgaatatagtggacgtactaaaaatccatttaatttagaagtcttctttaaactatagaccacaaacgccctaaatttgggcgtttgtatctgctaccaacatagtttacatactccattattccatatattagtataatttctgtatataccaacaagtgtataagtctttgtgtttcttttctctttgttgcctatgctgttattgtcacaatatttaagattaatgctctcaccaatctcaccgttataaccgag

SEQ ID NO: 30576 - DNA, 260 bp, Unknown
  Description of Unknown: RightRegion for integrase B4577 sequence
gcccgcagtgtgctgcgcaaatgcgtatgggacggggagactctttttttagaattttaatttgtgtatttttgtaactgttgggactgcaatagactcaaaaatacgtaaagaataaacctctttactgatttattcttttttgctatactaaaactgttccagagtgttgtaaacatttgacaacggaactacaggtaaataaagagcgaaaaagccccggctaccatggggctttttcgttttttgcctatactgca

SEQ ID NO: 30577 - DNA, 260 bp, Unknown
  Description of Unknown: RightRegion for integrase B4578 sequence
agagataaagacaatcccacttttacattaaatctcaagccccgaatcccgcgtatttaggggcttttctattagcgacaacatttttggactcacgaacttgcccatctcgagatgatctgcgccattgtgcaccagcttacccgcgacctgacacctgaacaattaaaggaatctggattcgaccaatattatgttgaccacacgttagcactttggcctcaggcagccagcggcacaccttggagcgcaacaacatt

SEQ ID NO: 30578 - DNA, 260 bp, Unknown; identical to SEQ ID NO: 30546
  Description of Unknown: RightRegion for integrase B4579 sequence

SEQ ID NO: 30579 - DNA, 260 bp, Unknown
  Description of Unknown: RightRegion for integrase B4580 sequence
cacgggcatgaagacgaattttctataattgtctatccagttgtcccaaaacataaatagcgtaaaagcagtaaatatctgcctttacgcttaccgatatataagtggtctatattcctctgtcgcgatatccgtcaaaagcccggaaacttcacggtacggcatgctgtaccgctgggacaggtaacgcatggaggcgctggactccccgtcggggcctccgtattgactgataatcattgccgcaagtgccggattgg

SEQ ID NO: 30580 - DNA, 260 bp, Unknown; identical to SEQ ID NO: 30541
  Description of Unknown: RightRegion for integrase B4581 sequence

SEQ ID NO: 30581 - DNA, 260 bp, Unknown
  Description of Unknown: RightRegion for integrase B4582 sequence
gataccgctccctacgtactgcccaacaagccgcatttggagatttttctgaagggctagaggttgatagctaagctctaaccatcggcgaaactaacccgaaaacgttacagaaaaacgtatctgttaccttctgggttatacttcctttgcggaagggatttaagatgacaacgcagcaagcactttttgaagagctgaagagtacggcggtatcaccgtacgaagagctcaaagcgtatgaatatatgtactcacgt

SEQ ID NO: 30582 - DNA, 260 bp, Unknown
  Description of Unknown: RightRegion for integrase B4583 sequence
gaaaaaggaaatcgttggagaaaaagcacttttgagattgatataactcctcttatttaaatatttttatcaattccatcataagtgtgctatttctatgggaggctcccaggtatttttagaaccaggtgaaacccagagcgtagacactatgataaaatgtattgctgtctcctccgctaacgatgcatgtgtggcgtattcgcatagtaggaattaatttgctacctgaaatggattacggaatctgtaataaatat

SEQ ID NO: 30583 - DNA, 260 bp, Unknown
  Description of Unknown: RightRegion for integrase B4584 sequence
gcccgcagtgtgctgcgcaaatgcgtgtgggacggagagactctttttttagaattttaatttatgtctttttgtgactgttgggactgcaatagaatcaaaaagatgcaaaaaaacatttgaaaaggtattgacacgccactcattgagtgttataattaagatacattaaaggaagggaggtggtgatgtgaatgatcccatagaaataataaaagacctgctcgagatcatcgttcttctcgaaacgcttcgaacga

SEQ ID NO: 30584 - DNA, 109 bp, Unknown
  Description of Unknown: RightRegion for integrase B4585 sequence
attgacaacattgaaaactgcgcggaaagttcgtataaactctgcttaggtccaccataagtctcgccgtgattttagtcaaattgcggcgggctttttgcgttgacac

SEQ ID NO: 30585 - DNA, 260 bp, Unknown
  Description of Unknown: RightRegion for integrase B4586 sequence
attgaatatagcagggataataatacagaatttatattagacgttttccttaaggattaaatgtctatatctaactcaattgggcagtgatcggaacccatgacatcggttaagatctccgcatctttgatcttgtctttgatagaatcagatgttaagaaataatcgatacgccatccagcgttccgctctcttgccttaaatcgatagctccaccatgaatacttttctgtatctgggtgtaaatatcgataggaatc

SEQ ID NO: 30586 - DNA, 260 bp, Unknown
  Description of Unknown: RightRegion for integrase B4587 sequence
tccggaattggaagatatgtagataatccattcagattagagatattcttaaaactgtaaaagcccttaaacagggcttttacataaccaccaacagtaatgttctgatgaagaaggcgttatggagattctccgtgaagaagcccgcactgctggacttgaggaaggacgttccgctggacttgaagaaggacgtataaccgcagctatcgatgccattaaaaatatcatgacaaagcttgacaaatctgctgatgaag

SEQ ID NO: 30587 - DNA, 260 bp, Unknown
  Description of Unknown: RightRegion for integrase B4588 sequence
ggagataaagataatcccacttttacactgaatctcaagccccgaatcccgcgtatttaggggcttttctattagcgacaacatttttggactcacgaacttgcccatctcgagatgatctgcgccattgtgcaccagcttacccgcgacctgacacctgaacaattaaaggaatctggattcgaccaatattatgttgaccacacgttagcactttggcctcaggcagccagcggcacaccgtggagcgcaacaacatt

SEQ ID NO: 30588 - DNA, 260 bp, Unknown
  Description of Unknown: RightRegion for integrase B4589 sequence
gtattacacgaacctttttactttgtcggcggctttgccgtcacaatatggttcaagtaataccgacagaaaagaacggatattctcacttgttgagagtgtccgtcctttctttatgtcctgcggattgtccacggacagtctgcggacagtcacagaatgcagctattttcacttaccgttaagtaagatttccgtgatttttaaccgcgcattctcatttgcgcaagaatccacacaaacacaactctgaatgctat

SEQ ID NO: 30589 - DNA, 260 bp, Unknown
  Description of Unknown: RightRegion for integrase B4590 sequence
gctcgcagcgtactccgcaaatgcgtatgggacggtgagactctttttttagagttttaatttatgtctttttgtaactgttgagactgcgatagaatcaaaaatatgtaaaaaataaacctctttactgatttattcttttttgctatactgaaactgttccagaatgttgtaaacatttgacaacggaactacaggtaaataaagagcgaaaaagccccgactaccatggggctttttcgttttttgcctatactgca

SEQ ID NO: 30590 - DNA, 260 bp, Unknown
  Description of Unknown: RightRegion for integrase B4591 sequence
cttgataaacttctacaaattattactcgcatgaaagtgagggaactatatgctgcctgaaaaaaatgaattcccaataattcaaattgagattgcaaaaataaaatttcttaacccacgaacaagaaataaggtagtgcatgaagaaataaaggaaagcataaaaaaaagaggattaagcaagcctataagcgtaagagctattgatgaaggcgatttcaaatatgctttaatttgtggtcaagggagaatagaggctc

SEQ ID NO: 30591 - DNA, 260 bp, Unknown
  Description of Unknown: RightRegion for integrase B4592 sequence
gtcttgccagtgttagaggctgatgagttcgattttgacacttacaggatgattgagtaagccctctaaagaaggtaacttattgctaaaaaaaaatattctcaggggtagttatggctaacaaaaaacatagtgtgtttaaagccctttcaatgggctttgaaaaagttcttgatgagcgtggttatgataatggcgcttattacgtcaaggatggcaagatttggatttttgatattgtagctttaaagcaaaaatta

SEQ ID NO: 30592 - DNA, 260 bp, Unknown
  Description of Unknown: RightRegion for integrase B4593 sequence
ctggataaacttctacaaattattactcgcatgaaagtgagggaactatatgctgcctgaatcaaatgaattcccaataatccaaattgaaattgccaaaataaaatttcttaacccgcgaactagaaataaggtagtgcatgaagaaattaaggaaagtataaaaaaaagaggattaagcaagcctataagcgtaagagcgattgatgaagacgacttcaaatatgctttaatttgtggccaagggagaatagaggctc

SEQ ID NO: 30593 - DNA, 200 bp, Unknown
  Description of Unknown: RightRegion for integrase B4594 sequence
accgtgtgcttttggcaacgacagcttcatcgtgtgccggtccctttccgtcgatgttgagcagggtatccagctccaccagacgggcgtttttgcttctcagttcttcttcataaaggaatggctttccgacttcctcctttgcggcagcctgctgctgatagaggttatccagctgggcctttgccgcctccagacgc

SEQ ID NO: 30594 - DNA, 260 bp, Unknown
  Description of Unknown: RightRegion for integrase B4595 sequence
tgcgaagattgtcgtttctttttgttttgtatgtttatcttttcgtttttctttttttgattagaaagataacggacaaaagaaaaattatgcggaaaccggttttgtcatcgataatgcatcatccgtttgcagcttttccgagcaatagcaccgacgccgattgttatcgttttttctgttgtgtattagatttaaaaagaagcttcataaaaacattttgaaataattattgttgacaaaatgatgcaatatatgta

SEQ ID NO: 30595 - DNA, 260 bp, Unknown; identical to SEQ ID NO: 30483
  Description of Unknown: RightRegion for integrase B4596 sequence

SEQ ID NO: 30596 - DNA, 260 bp, Unknown
  Description of Unknown: RightRegion for integrase B4597 sequence
cttttttattacttacagataccgcggagaatcgaactctgtgcagggcgcgggcgttaggaaaacgcgtgagcgtttttagcccgcgggcgaggacgccggcaggcggccgaagccggtgcggatccgcgaagcggatacgcggacgtcctttcgcccgcaccattgaatggaagagctcccagcaatgggagcttttttgttatgggcctcttgttgatgtcacgttgctgcttcgtgcgggtatcctagtgccaacg

SEQ ID NO: 30597 - DNA, 260 bp, Unknown
  Description of Unknown: RightRegion for integrase B4598 sequence
cttttttattacttacagataccgcggagaatcgaactctatgcagggcgcgagcgttaaacaaacgcggagcgtttgtagcgagcgggcgaggacgccggcaggcggccgaagccggtgcgtatttgcgaagcaaatacgcggattctccgcgaaaacttcgactcaaaacggatgcgatgtttatcgaatctcagccggccatgcgccgcatcagcggatcccctcccgcaccgcggagaatcgaactctgtgcaggg

SEQ ID NO: 30598 - DNA, 260 bp, Unknown
  Description of Unknown: RightRegion for integrase B4599 sequence
cttgataaacttctacaaattattactcgcatgaaagtgagggaactatatgctgcctgaaaaaaatgaattcccaataattcaaattgagattgcaaaaataaaatttcttaacccacgaacaagaaataagttagtgcatgaagaaataaaggaaagcataaaaaaagaggattaagcaagcctataagcgtaagagctattgatgaaggcgatttcaaatatgctttaatttgtggtcaagggagaatagaggctct

SEQ ID NO: 30599 - DNA, 260 bp, Unknown
  Description of Unknown: RightRegion for integrase B4600 sequence
gcccgcagtgtgctgcggaaatgtgtatgggacggagagactctttttttagaattttaatttatgtctttttgtcactgttgggactgcaacagaatcaaaaatatgtgaaaaataaatctctttacttgtttattcttttttgctatactggaactgttccagaatgttgtaaacatttgacaacggaactacaggtaaataaagagcgaaaaagcccctgctaccatggggctttttcgttttttgcctatactgca

SEQ ID NO: 30600 - DNA, 260 bp, Unknown
  Description of Unknown: RightRegion for integrase B4601 sequence
ggacaccgtgatgatgcgtcctttgaacttactataaagccccgaatcccccgtatttaggggcttttacgttacttctaccaaaaatgggatacttcttccgtccctatatctgtaagcgtccccgtcacttcattatacggcatcgtataacgctgcgataaataccgcatagatgccgccaactcgccatccggtcctccaaattgactaatgatcacctgtgctattttgggatttgtctgcgtgatattcaccgg

SEQ ID NO: 30601 - DNA, 109 bp, Unknown
  Description of Unknown: RightRegion for integrase B4602 sequence
ttaatccgaaagatcactttttataaccaggagcacatcaaaattgaatataccgtttaattaaatattaggaaagtcccattttctgggactttccattatgtttcat

SEQ ID NO: 30602 - DNA, 260 bp, Unknown
  Description of Unknown: RightRegion for integrase B4603 sequence
cttgataaacttctacaaattattactcgcatgaaagtgagggaactatatgctgcctgaaaaaaatgaattcccaataattcaaattgagattgcaaaaataaaatttcttaacccacgaacaagaaataagttagtgcatgaagaaataaaggaaagcataaaaaaaagaggattaagcaagcctataagcgtaagagctattgatgaaggcgatttcaaatatgctttaatttgtggtcaagggagaatagaggctc

SEQ ID NO: 30603 - DNA, 260 bp, Unknown
  Description of Unknown: RightRegion for integrase B4604 sequence
ggagataaagataatcccacttttacactgaatctcaagccccgaatcccgcgtatttaggggcttttctattagcgacaacatttttggactcacgaacttgcccatctcgagatgatctgcgccattgtgcaccaacttacccgcgacctgacacctgaacaattaaaggaatctggattcgaccaatattatgttgaccacacgttagcactttggcctcaggcagccagcggcacaccttggagcgcaacaacatt

SEQ ID NO: 30604 - DNA, 260 bp, Unknown
  Description of Unknown: RightRegion for integrase B4605 sequence
cccgaatatagtggacgcactaaaaatccatttaatttggaagtcttctttaaactatagaccacaaacgccctaaatttgggcgtttgtatctgctaccaacatagtttacatactccattatatcaactatgttggtagtaacttagattgacagtaatagcgttttgttttatactaatttcattgcataaacagtaacatatatatgtattgaaatatacgattttgcattaattatgttttaagtttatttttaa

SEQ ID NO: 30605 - DNA, 260 bp, Unknown; identical to SEQ ID NO: 30587
  Description of Unknown: RightRegion for integrase B4606 sequence

SEQ ID NO: 30606 - DNA, 260 bp, Unknown
  Description of Unknown: RightRegion for integrase B4607 sequence
ggagataaagataatcccacttttacattaaatctcaagccccgaatcccgcgtatttaggggcttttctattagcgacaacatttttggactcacgaacttgcccatctcgagatgatctgtgccattgtgcaccagcttacccgcgacctgacacctgaacaattaaaggaatctggattcgaccaatattatgttgaccacacgttagcactttggcctcaggcagccagcggcacaccgtggagcgcaacaacatt

SEQ ID NO: 30607 - DNA, 260 bp, Unknown
  Description of Unknown: RightRegion for integrase B4608 sequence
gaaagtgacctctcgctcaccctccatcccgtggttttttcttcaaccaccaacagataacatcaatgcgcggatgaacttgcgcacatggagatgatctccgctatcgtgtaccagctgacgcgcaatctcacgcccgagcagatcaaggagggcggctttgacgcctactttgtcgatcacacgaccggcatttacccgcagtcggcctccggtatcccgtggagcgccgcaacgttccagtccaaaggcgacccgat

SEQ ID NO: 30608 - DNA, 260 bp, Unknown; identical to SEQ ID NO: 30555
  Description of Unknown: RightRegion for integrase B4609 sequence

SEQ ID NO: 30609 - DNA, 260 bp, Unknown
  Description of Unknown: RightRegion for integrase B4610 sequence
ttggacttcctgcaaatgacgatttacccccgcgtaccggcgggggaaatacagagatagcatcgcgtgtaagacgaatttttctcctgatgttatctttctatcttgaagccatggaaaaggggcgcgtttcctcgcgccccgtcagtcctactttccagatgtatcagccatgcgcacaactgtatttatataatatcataatgcttttatgccctcaagacgatttttaatgcaacttatgcaataaaaaatcaggc

SEQ ID NO: 30610 - DNA, 260 bp, Unknown
  Description of Unknown: RightRegion for integrase B4611 sequence
tattacgtggcatggcgcacgctcgtcatagtcaccaaatacaggaagaccccctgctagggggtcttctccttttctgaccaagtttccggctctacaccttgagcaggtagtcatccgccgcagggccgccggttggcttgcctactgccacgtatcgcttctggccagactgggcgcctgtgtagcgcccccagacccatccgtcggcgatcttgtaccagtcatcaagcgttacctcgccgcccttgttgtagtag

SEQ ID NO: 30611 - DNA, 260 bp, Unknown
  Description of Unknown: RightRegion for integrase B4612 sequence
agtcccaccaaagaaaaagacgttgaaacgcatgttttaacgtcttttctttttgtttgaccgcagttttgaccacacccgcgttttcatgcgttcagaactttgtcaaatgcagcgctcattgctgtggcggtttcgtgctcctcgccctcgatgcggtgcgaataggtcccgcgggtgtccatgttcttgctgtgccccacaagggctttcagtttgccgtcgggcaaatcctgggccattgatacaaacgtgtggcg

SEQ ID NO: 30612 - DNA, 260 bp, Unknown
  Description of Unknown: RightRegion for integrase B4613 sequence
tattatgtggcatggcggacactcgtcatagtcacgagatacaagaagacccccagctagggggtcttctccttttctgccgaggtgtcagcctcagactttgagcaggtaatcgtcagccgcagggccgcccgtgggcttaccaaccgcgacatatcgcttctgtccggactgagcgccggtgtagcgtccccagacccagccatcggcgatcttgtaccagtcatcgagcaccacggtctgccccttgttgtagctgg

SEQ ID NO: 30613 - DNA, 260 bp, Unknown
  Description of Unknown: RightRegion for integrase B4614 sequence
gaaaaaggaaatcgttggagagaaagcacttttgagattgatataactcctcttatttaaatatttttatcaattccttcatatgtgtgctatttctatgggaggctcccaggtatttttagaaccaggtgaaacccagagcgtagacactatgataaaatgtattgctgtctcctccgctaacgatgcatgtgtggcgtattcgcatagtaggaattaatttgctacctgaaatggattacggaatctgtaataaatat

SEQ ID NO: 30614 - DNA, 260 bp, Unknown
  Description of Unknown: RightRegion for integrase B4615 sequence
cccgaatatagtggacgcactaaaaatccatttaatttggaagtcttctttaaactatagaccacaaacgccctaaatttgggcgtttgtatctgctaccaacatagtttacatactccattattccatatattagtataatttctgtatataccaacaagtgtataagtctttgtgtttcttttctctttgttgcctatgctgttattgtcacaatatttaagattaatgctctcaccaatctcaccgttataaccgag

SEQ ID NO: 30615 - DNA, 109 bp, Unknown; identical to SEQ ID NO: 30556
  Description of Unknown: RightRegion for integrase B4616 sequence

SEQ ID NO: 30616 - DNA, 260 bp, Unknown
  Description of Unknown: RightRegion for integrase B4617 sequence
tccggaattggaagatatgtagataatccattcagattagagatattcttaaaactgtaaaagcccttaaacagggcttttacacaaccaccaacagtaatgttctgatgaagaaggcgttatggagattctccgtgaagaagcccgtgctgctggacttgaggaaggacgttccgctggacttaaggaaggacgttccgctggacttgaggaaggacatatcgccgccattaaaaatatcatgacaaagcttggcaaat

SEQ ID NO: 30617 - DNA, 103 bp, Unknown
  Description of Unknown: RightRegion for integrase B4618 sequence
ttttccgatagagaaaaagttcgcgcaagttctccatcggtcaaccaggaagccatctgattcgttcagatggcttttttgttttatctctcggtgcgttttt

SEQ ID NO: 30618 - DNA, 260 bp, Unknown; identical to SEQ ID NO: 30538
  Description of Unknown: RightRegion for integrase B4619 sequence

SEQ ID NO: 30619 - DNA, 190 bp, Unknown
  Description of Unknown: RightRegion for integrase B4620 sequence
tttaatccgtcgagcgtcttggatacttcacataggtgttactacacctattattcctaaggttatcaatacctcggctaacgtaaaacctcgggtaatcattcttttttcggcggcgctaaatggtcctgtgcctgcgccaatggctcgtatggtgcttaaactactctgccccccccccggaaagtct

SEQ ID NO: 30620 - DNA, 260 bp, Unknown
  Description of Unknown: RightRegion for integrase B4621 sequence
ataacccctaaagacaaagatgattttaaattaaaattatttcctaaaatacaagcatagattatttttattctatgcttgtaacattaaccttttgataaaagatttggaaaaccagcttgttccactggtggatttcctcaacttaaaagaggtagtttgagtaattatgtttgtatagcacaagatgatttgaatactcttggatttagaacaaatggattagatggtatttttggtgctggaactcaaaatgccgt

SEQ ID NO: 30621 - DNA, 260 bp, Unknown
  Description of Unknown: RightRegion for integrase B4622 sequence
cttgataaatttctacaaattattactcgcatgaaagtgagggaactatatgctgcctgaaaaaaatgaattcccaataattcaaattgagattgcaaaaataaaatttcttaacccacgaacaagaaataaggtagtgcatgaagaaataaaggaaagcataaaaaaaagaggattaagcaagcctataagcgtaagagctattgatgaagacgatttcaaatatgctttaatttgtggtcaagggagaatagaggctc

SEQ ID NO: 30622 - DNA, 260 bp, Unknown; identical to SEQ ID NO: 30603
  Description of Unknown: RightRegion for integrase B4623 sequence

SEQ ID NO: 30623 - DNA, 260 bp, Unknown
  Description of Unknown: RightRegion for integrase B4624 sequence
tgttcgtataagcgctgttatggttcaccagacttaattaaagtcgaacacttattttgagtgttcggctttttttctttatcaccgagttcgtcaaggctgatgcatttttcgccgtccttgtagttgaacagcacgatgattttatcatcataaacatgaacgctatttacgaaaacatcaatcagccttaccggaaaaataaaagacccgccgtgtggacgggtaatgacggtgcaaataaagaaatttaataatgc

SEQ ID NO: 30624 - DNA, 260 bp, Unknown
  Description of Unknown: RightRegion for integrase B4625 sequence
gggtacaaagatgatgcgtcctttgaactaactataaagcctcgaatcccgcgtatttaggggcttttcggttacttctacagaaaatgggaaacttcgttgtccagtattcggtagaagtaacgtgaaaccgcctatttacaagggtttccgagtttttcatatctcgtatttttgtctgtttttgtcagaatttcttgccggaaaactcccaatttccggacgagtttctacctataataatgctgatcaaaaaacgg

SEQ ID NO: 30625 - DNA, 260 bp, Unknown
  Description of Unknown: RightRegion for integrase B4626 sequence
gaactgtccaaaaagttcgcacaaggtcacgtcgcctccaccaacataaaagccacctgaaaacttacgtttttcaggtggcttttgctatatctgctatacctgctattctgttacgccagatccggcaggatgtccgaccacagagcctgctcctgccgcaaggcatcaaagcagcagtccagatacattttgttgaccgcggcaaaaatggtgctgcgcagcagcagacgctcgtcgttgagcgtggcctccggctg

SEQ ID NO: 30626 - DNA, 91 bp, Unknown
  Description of Unknown: RightRegion for integrase B4627 sequence
aacatccgggaagttcttaaagactctcttacgggtcaccatgattgccgaacactatagatgaaatggcgaaaaagccagtcatttcaac

SEQ ID NO: 30627 - DNA, 260 bp, Unknown
  Description of Unknown: RightRegion for integrase B4628 sequence
gaaagttcgacggtgaagcgtctggtccgagtggcgagaatcgaactcacggcctcttgaaccccattgtgcttctctcgaaaacacaatgtacaatccgatactgcctagactcagtatcgttaaatttcaaatgcattataccattctgtttcattggatgtcaagacgtttcattccttttgtggtcaaattgtggtcaaacgaccccgacaaatgacttttctcccccagctaagttacatcgcgcaatttcgatt

SEQ ID NO: 30628 - DNA, 260 bp, Unknown
  Description of Unknown: RightRegion for integrase B4629 sequence
aaagcctgccagtgctctatatggcaccatattagtcaactgttcttttgctttctttaaacctgcctgatgttcccgaatagcattctttatttcaatcttagatgcatttgccggaagatcactgagttctgtcagctgtaaaattgccctttccagaccatctctgaccaatccatctgcctgtattccactaagatgaatatgaaattcccgtactgaataccaggcattcgcaatcatttcattaataatctcat

SEQ ID NO: 30629 - DNA, 260 bp, Unknown
  Description of Unknown: RightRegion for integrase B4630 sequence
aactctttgttcttttttaagagcttgtttggatatacaacaaagtaccgagtagagtaatctacccggtactttattttttattttaggcttttatctcacagaagttcaggcatataaattcttttgcgtctttgattttaccccacttcgcgccggagcgtaaatatgttttttcaatttctaattctgccccggtttcaactgttcttacgataggagaggcatacgtgggtcgaacacgtacatttacattttct

SEQ ID NO: 30630 - DNA, 106 bp, Unknown
  Description of Unknown: RightRegion for integrase B4631 sequence
aactctttattcttttttaagagcttgtttggatatacgataaaataccgagtagagtaatctacccggtatttttttttttttttttttttttattttttatttt

SEQ ID NO: 30631 - DNA, 76 bp, Unknown
  Description of Unknown: RightRegion for integrase B4632 sequence
gaaagttcgacggtgaagcgtctggtccgagtggcgagaatcgaactcacggcctcttgaaccccattcaagcgcg

SEQ ID NO: 30632 - DNA, 260 bp, Unknown
  Description of Unknown: RightRegion for integrase B4633 sequence
ggctgttcgactgagaagcaaatggtccgagtggcgagaatcgaactcacggcctcttgaaccccattgtgcttctctcaaaaacgcaatggacactccgataccacttgtacgcagtatcatcaaatttcaaaattattttatcattctgtttcgttagatgtcaagatgtttcgtttcttttgtggtcaaattgtggtcaaccgaccctgacaaatgaccattctcccctactaagttacatggcgcaattccgattt

SEQ ID NO: 30633 - DNA, 260 bp, Unknown
  Description of Unknown: RightRegion for integrase B4634 sequence
tatgatgactatctggagttccggtttaagtccggtgtgacggtcagcgtggaaaagtgaatataatgatatgatccccctcatcaggtaggaagctgagacttcttgcttggtgagggggattttttctttttgggactaactagtcctgattactattgactttttttatgcttatatgctattatgaatacagttccggttgagcatatcattttaaactgactatggaggatgtcaaattatgaaaagagagaaga

SEQ ID NO: 30634 - DNA, 260 bp, Unknown
  Description of Unknown: RightRegion for integrase B4635 sequence
actcgaacacagacgagcggatataaatttagtatatcaatagataccaaagcggcataaatactaatcgttcatattgcacttatgttttacaaaaggctggcaccttatcgtgtcagcctttttttgttattctatcatctgcgccagccacacgtcaagtaccttgccttccgacgcgtctggatcgttcatgtaagcttttgctacacggatatacatattaatgtcattaccgtaaatttcggagtagtcggagt

SEQ ID NO: 30635 - DNA, 260 bp, Unknown
  Description of Unknown: RightRegion for integrase B4636 sequence
agagatgaagtgtgctttgaattaaagtgcggattgaagctgatagaaaggttggtgtagatatgatgcatacgccatacggctacaaaattgaaaatggccaagcggttattgatgaaccgctcgcaaagaaagtaagacagctttttgtggaatttttgaattgtggttctatgagggcagcagctgttaaggttggaattgaaaaaacacactccgtcattggcaggcttctaagaaatgaagtgtatttgggagat

SEQ ID NO: 30636 - DNA, 260 bp, Unknown
  Description of Unknown: RightRegion for integrase B4637 sequence
cgtttccgactctatggcgggctggaactgagggagcgattggaggtggcggtaagatgacaaaacgcaagattttatatggataccagatctgtggcggcgcattggagatcgttccggaagagcagcgggtcgttcagatgctgttcgccctctacagtgccagagcatcttaccaggacatctccgatgcgttgaatcggcagggcgttccatacagctccgaaataccgctttggaacaagcataagataaagcgc

SEQ ID NO: 30637 - DNA, 260 bp, Unknown
  Description of Unknown: RightRegion for integrase B4638 sequence
aatatccgggaagttcttaaagactctcttacgggtcaccatgattgccgaacactatagatgaaatggcgaaaaagccagtcatttcaacgtgttcggcaattttttattctcaaaattctttggtaactccatagatgaaatcacggatggcaggggttttgaacctctgtttttccatattcaagggatttttgctgtcagcgccctttttcagagggctgcggcggcaagattccggaaataacgaagaaaaatct

SEQ ID NO: 30638 - DNA, 260 bp, Unknown
  Description of Unknown: RightRegion for integrase B4639 sequence
actcgaacacagacgagcggatataaatttagtatatcaatagataccaaagcggcataaatactgatcgttcatattgcacttatgttttacaaaaggctggcaccttatcgtgtcagcctttttttgttattctatcatctgcgccagccacacgtcaagtaccttgccttccgacgcgtcagggtcgtgcatatagtttttagctacacggatatacatattaaggtcgccgttgtatacgtcgctaaaatcagacc

SEQ ID NO: 30639 - DNA, 260 bp, Unknown
  Description of Unknown: RightRegion for integrase B4640 sequence
cgagggcgcaagcagttcgacccggggacggtagatatcgtctggaagactgacgcgtaaaaagcgggccgcgaggcaaaaagggtgggatagcaggcaaatcgccctaacccacccagtataacacttagatagtttactgtcaatatgttcttcatcacacaataggtagaggggtgcctattgtgtggttttgcttatcacggtgataagtagacgtgttgaatgagagggtcatcggggtcttaacatgttaaata

SEQ ID NO: 30640 - DNA, 260 bp, Unknown
  Description of Unknown: RightRegion for integrase B4641 sequence
atcaaagtctccactaactggttttgcataataacactgtttagctcgaaaaaaagttagcaaaattcaatatgagcttgccttattatggggtataccctataataatagacgtaagaaagaaaggaggtggttcaaatggatgacaaaatatgggacttaacgattgctgtcataagcgtgctactggcaaaggcgctggatgaaggaatcgaagccctaaagaaaaagacctctcgtaagcccggaaagcacacaaa

SEQ ID NO: 30641 - DNA, 260 bp, Unknown
  Description of Unknown: RightRegion for integrase B4642 sequence
aggtacgaatctcgtctactttacaacctgacgatccctcgccccgatcttgccgcttaaatcatttgtacccctcgatcatcgcgcgcacctccgccgtcttctccatcagctcatcgtgcatggcgctataggccgcgatcattccctcggcatactccggcttcctcttgtattcctcgcccgccttgtacgcctcgatcatcttcttgaccaacgcgtggccgttggtgttaaacgcaatgtgcgcgttcgccatt

SEQ ID NO: 30642 - DNA, 260 bp, Unknown; identical to SEQ ID NO: 30636
  Description of Unknown: RightRegion for integrase B4643 sequence

SEQ ID NO: 30643 - DNA, 260 bp, Unknown
  Description of Unknown: RightRegion for integrase B4644 sequence
aacatatttgtaaataaggattggtttacaatagttttcgacataaaagagataggctagtgcctatctctttttcttacgctctgaagcccttgatatataaggctttcagaacctcgccgtttatttgcgttttaaggcggttgttttagtctcgtggacatattataccttgaattttatcctagaacttatcggaaagtgtattttcttcctctctcactgccatgacctgttcttgcagcacttcttccagcacg

SEQ ID NO: 30644 - DNA, 260 bp, Unknown
  Description of Unknown: RightRegion for integrase B4645 sequence
gaactgtccaaaaagttcgcacaaggtcacgtcgcctccaccaacataaaagccacctgaaaacttacgtttcaggtggcttttgctatatctgctattctgttacgccagatccggcaggatgtccgaccacagagcctgctcctgccgcaaggcatcaaagcagcagtccagatacattttgttgaccgcggcaaaaatggtgctgcgcagcagcagacgctcgtcgttgagcgtggcctccggctgggctgtcttgc

SEQ ID NO: 30645 - DNA, 260 bp, Unknown
  Description of Unknown: RightRegion for integrase B4646 sequence
ttgactcttgtgtttcacctaaaatgcggcttgaatctaaaagaaaggttggtgaaatagatgaaaacacatataccatacggatacagaattgtcgatggaaaggctattatcgataaggatgaggcagaacaggtaagaaggttatttgatgagtatatttccggtaaggcgttaaaggtagctgcagaaaacgtggggcttaatatatttcatagcagtgctggtaatatacttagaaatacccgctatcttggtga

SEQ ID NO: 30646 - DNA, 260 bp, Unknown
  Description of Unknown: RightRegion for integrase B4647 sequence
atcaaagtctccactaactggttttgcataataacactgtttagctcgaaaaaaagttagcaaaattcaatatgagcttgccttactatggggtataccttataatgatagacgtaagcaagaaaggaggtggttcaaatggatgacaaaatatgggacttaacgattgctgtcatcagcgtgctactggcaaaggcgctggatgaaggaatcgaagccctaaagaaaaagacctctcgcaagcccggaaagcacacaaa

SEQ ID NO: 30647 - DNA, 260 bp, Unknown
  Description of Unknown: RightRegion for integrase B4648 sequence
tgcaatttcacgcttaacgtgattccgctctttccggaaataaaaacaggagcagaatgactataatgacgccggacgtatacatgataccatatatcattatagcacaccactacatcttttgtttccggaacatttcggtgcaacggcagatgtcgccgttctttgcagcctgctgttccgtacggtatcttagttcctgaccggatcgctcgatttattcctgttttcagcaccagtttttctgatgactccttgta

SEQ ID NO: 30648 - DNA, 260 bp, Unknown
  Description of Unknown: RightRegion for integrase B4649 sequence
gaactgtccaaaaagttcgcacaaggtcacgtcacctccaccaacataaaagccacctgaaaacttacgtttttcaggtggcttttgctatatctgctatacctgctattctgttacgccagatccggcaggatatccgaccacagagcctgctcctgccgcaaggcatcaaagcagcagtccagatacattttgttgaccgcggcaaaaatggtgctgcgcagcagcagacgctcgtcgttgagcgtggcctccggctg

SEQ ID NO: 30649 - DNA, 260 bp, Unknown
  Description of Unknown: RightRegion for integrase B4650 sequence
ttccacctcaagtgtggattaaatctaactgaagggagtaaacatcatgtcaaagcttaaatacggttatcaatggcaagccggacaaattgtcatcaaccctgaccaagctgatgtaatcaagcaaatcttcgctggttttcttgctggccagactcgcaatcatctagcgcgccaatttaacttaactcatacttctgttttgcgaatcttaacttcaaataaatatgttggtggagacggctacccacaaatcatta

SEQ ID NO: 30650 - DNA, 94 bp, Unknown
  Description of Unknown: RightRegion for integrase B4651 sequence
gaaagttcgacggtgaagcgtctggtccgagtggcgagaatcgaactcacggcctcttgaaccccattcaagcgcgctaccaaaactgcgctac

SEQ ID NO: 30651 - DNA, 260 bp, Unknown
  Description of Unknown: RightRegion for integrase B4652 sequence
gaactgtccaaaaagttcgcacaaggtcacgttgcctccaccaacataaaagccacctgaaaacttacgtttttcaggtggcttttgctatatctgctatacctgctattctgttacgccagatccggcaggatgtccgaccacagagcctgctcctgccgcaaggcatcaaagcagcagtccagatacattttgttgaccgcggcaaaaatggtgctgcgcagcagcagacgctcgtcgttgagcgtggcctccggctg

SEQ ID NO: 30652 - DNA, 260 bp, Unknown
  Description of Unknown: RightRegion for integrase B4653 sequence
atcaaagtctccaataactggttttgcattgtaacattgttcaactcgaaaaaaagttaacgaaatcgaaaatcagcttgcgttactatggggtataccttataatagtagatgtaagcaagaaaggaggtggttcaaatggatgacaaaatatgggacttaacggttgctgtcatcggcgtgctactggcaaaagcgctagatgaaggaatcgaagccctgaagaaaaagacctctcgcaagccgggaaagcacgcaaa

SEQ ID NO: 30653 - DNA, 260 bp, Unknown; identical to SEQ ID NO: 30634
  Description of Unknown: RightRegion for integrase B4654 sequence

SEQ ID NO: 30654 - DNA, 109 bp, Unknown
  Description of Unknown: RightRegion for integrase B4655 sequence
cccggtaagggcaatcgctttttagaaaacaagttcagccttgagattttctttttatagctatcatatataacattgtggtaagtacgaattggggcaccttgaaatg

SEQ ID NO: 30655 - DNA, 260 bp, Unknown
  Description of Unknown: RightRegion for integrase B4656 sequence
aaatttgaaaaaagaacagctataatattaaatttagctgttcttttcttttttatataaaattacaaaatatccaatatctaaatatgtgacatctgctggtaccatatcttttattggtcttagtttatcatatcctatttcgtcaattgctttaaaaacttgacttttatatttcatattaatatttttttctaaatctatatccaaaccattttcaaaatttgctaataaatgatgctctatcgtttgctttgtaa

SEQ ID NO: 30656 - DNA, 260 bp, Unknown
  Description of Unknown: RightRegion for integrase B4657 sequence
ggagaggccgaaaaagcctcatttgaactcacaataaagccccgaatcccgcgtatttaggggctttttatcatttccaacaaaaacgggataaagatttatcccgttttctgtggaaatgattttaataggaagaaatgcaatacaaagatggtacaatattcaggattcctggggcttttgacggccccgggaattgttttacacctgctttccactgctgtcgaagctgtattcttttccggaaatgaccagcgtct

SEQ ID NO: 30657 - DNA, 260 bp, Unknown
  Description of Unknown: RightRegion for integrase B4658 sequence
aatctagactatctttacgaaatggctaagtgtatatcaatcagagggcaactaagatgaataaacaattatatgatatcgaaataagcaaaatttttatattgaaccctcgcgaacgaaataaacaaattgccggagaaataagaaaaaatattgaagatgttggcttaaaacgtccaataactatcacgcgcaaacagtttccacaagatggatacgaatatgatttagtttgtggacaaggaagattggaggcttat

SEQ ID NO: 30658 - DNA, 90 bp, Unknown
  Description of Unknown: RightRegion for integrase B4659 sequence
aacatccgggaagttcttaaagactctcttacgggtcaccatgattgccgaacactatagatgaaatggcaaaaaagccagtcatctcaa

SEQ ID NO: 30659 - DNA, 260 bp, Unknown
  Description of Unknown: RightRegion for integrase B4660 sequence
aactctttgttcttttttaagagcttgtttggatatacaacaaagtaccgagtagagtaatctacccggtactttgtttttttttgttttttattttaggcttttatctcacagaagttcaggcatataaattcttttgcgtctttgattttaccccacttcgcgccggggcgtgaatatgttttttcaatttccaattctgccccagcttcagctgttcttacgataggggagctatacgtgggtcgaacacgtacatt

SEQ ID NO: 30660 - DNA, 109 bp, Unknown
  Description of Unknown: RightRegion for integrase B4661 sequence
accaaaatgatgacgggattttccgggtgttcgcgttgcgaacgtttggtgacccggtagggattcgaaccctagacctactgattcgtagtcagtcactctatccagc

SEQ ID NO: 30661 - DNA, 260 bp, Unknown
  Description of Unknown: RightRegion for integrase B4662 sequence
atcaaagtctccactaactggttgtgcataataacactgtttagctcgaaaaaaagttagcaaaattcaatatgagcttgccttattatggggtataccctataataatagacgtaagaaagaaaggaggtggttcaaatggatgacaaaatatgggacttaacgattgctgtcataagcgtgctactggcaaaggcgctggatgaaggaatcgaagccctaaagaaaaagacctctcgtaagcccggaaagcacacaaa

SEQ ID NO: 30662 - DNA, 260 bp, Unknown
  Description of Unknown: RightRegion for integrase B4663 sequence
actcgaacacagacgagcggatataaatttagtatatcaatagataccaaagcggcataaatactaatcgttcatattgcacttatgttttacaaaaggctggcaccttatcgtgtcagcctttttttgttattctatcatctgcgccagccacacgtcaagtaccttgccttccgacgcgtctggatcgttcatgtaagcttttgctacacggatatacatattgatgtcgctgccgtaaatctcggagtagtcggagt

SEQ ID NO: 30663 - DNA, 260 bp, Unknown
  Description of Unknown: RightRegion for integrase B4664 sequence
aactctttgttcttttttaagagcttgtttggatatacaataaaataccgagtagagtaatctacccggtattttatttttttattaggctttatccaattacactctcttaagatacttacccgcgcacatccagtagccgctttccaactgacaccaattgccctgtcgagcgacaacgtagaagatttcaccccttgagtactgaccgactcggcgataccttactgacggtccttttctgacatataacattttgc

SEQ ID NO: 30664 - DNA, 260 bp, Unknown
  Description of Unknown: RightRegion for integrase B4665 sequence
gaactgtccaaaaagttcgcacaaggtcacgttgcctccaccaacataaaagccacctgaaaacttacgtttttcaggtggcttttgctatatctgctattctgttacgccagatccggcaggatatccgaccacagagcctgctcctgccgcaaggcatcaaagcagcagtccagatatattttgttgaccgcggcaaaaatggtgctgcgcagcagcagacgctcgtcgttgagcgtagtctccggctgggctgtctt

SEQ ID NO: 30665 - DNA, 260 bp, Unknown
  Description of Unknown: RightRegion for integrase B4666 sequence
actcggacacagccgagcgcatataattttagtatatcaatagatactaaagctgcataaatactaatcgttcatatagcgcttattttacaaaaggctgccacattatcgtgtcagtctttttttgttattatactatctgcgctaaccacatgtcaagcactttgccttccgacgcgtctggatcgttcatgtaagcttttgctacacggatatacatattaatgtcattaccgtaaatttcggagtagtcggagtgc

SEQ ID NO: 30666 - DNA, 109 bp, Unknown
  Description of Unknown: RightRegion for integrase B4667 sequence
accaaaatgatgacgggaaatcctgggtgttcgcgttgcgaacgtttggtgacccggtagggattcgaaccctagacctactgattcgtagtcagtcactctatccagc

SEQ ID NO: 30667 - DNA, 63 bp, Unknown
  Description of Unknown: RightRegion for integrase B4668 sequence
aacatccgggaagttcttaaagactctcttacgggtcaccatgattgccgaacactatagatg

SEQ ID NO: 30668 - DNA, 260 bp, Unknown
  Description of Unknown: RightRegion for integrase B4669 sequence
gtgctggtttttctttttgtgcgagggagcagacctcgaacaacactatttattatataaaagaaagcgcgatgaattctgagaactcatcgcgttttttctcttatgcgggtagtgggggtcgaacaacaaaaaatgattgagtgatgtcaaaaacatatctgcaatgcgtctaagcacttgctaaaaaggtagtggggttggtttgtagcccatgtattttgctacgtttacaaaaaagagtgttaccaaaactgtta

SEQ ID NO: 30669 - DNA, 260 bp, Unknown
  Description of Unknown: RightRegion for integrase B4670 sequence
gtgctggtttttctttttgtgcgagggagcagacctcgaacaacactatttattatataagaaagcgcgatgaattctgagaactcatcgcgctttttctcttatgcgggtagtgggggtcgaacaacaaaaaatgattgagcgacgtcaaaaacgtatctgcaacgcgcctaagcacttgctaaaaaggtagtgcggctggtttgtagcccatgtattttgctacgtttacaaaaaagagtgttaccaaatgtgttacc

SEQ ID NO: 30670 - DNA, 260 bp, Unknown; identical to SEQ ID NO: 30648
  Description of Unknown: RightRegion for integrase B4671 sequence

SEQ ID NO: 30671 - DNA, 260 bp, Unknown
  Description of Unknown: RightRegion for integrase B4672 sequence
cgtttccgactctatggcgggctggaactgagggagcgattggaggtggcggtaagatgacaaaacgtaagattttatatggataccagatccgtggcggcgcattggagatcgttccggaagagcagcgggtcgttcagatgctgttcgccctctacagtgccggagcatcttaccaggacatctccgatgcgttgaatcggcagggcgttccatacagctccgaaataccgctttggaacaagcataagataaagcgc

SEQ ID NO: 30672 - DNA, 260 bp, Unknown; identical to SEQ ID NO: 30664
  Description of Unknown: RightRegion for integrase B4673 sequence

SEQ ID NO: 30673 - DNA, 260 bp, Unknown
  Description of Unknown: RightRegion for integrase B4674 sequence
atcaaagtctccaataactggttttgcattgtaacattgttcaactcgaaaaaaagttaacgaaatcgaaaatcagcttgcgttactatggggtataccttataatagtagacgtaagcaagaaaggaggtggttcaaatggatgacaaaatatgggacttaacggttgctgtcatcggcgtgctactggcaaaagcgctagatgaaggaatcgaagccctgaagaaaaagacctctcgcaagccgggaaagcacgcaaa

SEQ ID NO: 30674 - DNA, 260 bp, Unknown
  Description of Unknown: RightRegion for integrase B4675 sequence
gaaagttcgacggtgaagcgtctggtccgagtggcgagaatcgaactcacggcctcttgaaccccattgtgcttctctcaaaaacgcaatggacactccgataccacttgtacgcagtatcatcaaatttcaaaattattttatcattctgtttcgttagatgtcaagatgtttcgtttcttttgtggtcaaattgtggtcaaccgaccctgacaaatgaccattctcccctactaagttacatggcgcaattccgattt

SEQ ID NO: 30675 - DNA, 260 bp, Unknown
  Description of Unknown: RightRegion for integrase B4676 sequence
actcttcacagggttcggatttttttgtgttttatccggggaaggctgtgtttggggtgattgtcagcagataataagagtgcccaagtttgccttggacaccggaatttgcttttcctttgaatacattttttagaaattgccaataagagtttcaaatatttcgataagttttttggattcggagtcatcaggaaataaaccttgataatctctgtcggaaaaaatgatattatatttatcacagtctaatggataac

SEQ ID NO: 30676 - DNA, 260 bp, Unknown
  Description of Unknown: RightRegion for integrase B4677 sequence
aacatggactatctttatgaaatggcgaaatgcatatctatccgagaggtaaaacaatgaacagagaattacgcaacgtggaaatcaataaaattttcgtgctgaatcccagagaacgtaacaaacaaatagccaaagaaatccgtcaaaatattgaagatgttggattaaagcgcccgattacgatttccaaaaaagctgttccacaagatggatatgaatatgatttagtttgtggacaaggcaggcttgaagcctat

SEQ ID NO: 30677 - DNA, 260 bp, Unknown
  Description of Unknown: RightRegion for integrase B4678 sequence
gaactgtccaaaaagttcgcacaaggtcacgtcacctccaccagtacaaaagccacctgaaaacttacgttttcaggtggcttttgctatatctgctattccgtgcttttctgtcacgccagatctggcaggatatccgaccacagagcctgctcctgccgcaaggcatcaaagcagcagtccagatacattttgttgaccgccgcaaaaatggtgctgcgcagcagcagacgctcgtcgttgagcgtagtctccggctg

SEQ ID NO: 30678 - DNA, 69 bp, Unknown
  Description of Unknown: RightRegion for integrase B4679 sequence
gaaagttcgtctgagatgcgtctggtccgagtggcgagaatcgaactcacggcctcttgaaccccattc

SEQ ID NO: 30679 - DNA, 260 bp, Unknown
  Description of Unknown: RightRegion for integrase B4680 sequence
ggtcatctgaatgagcctaactttgagttgaccataaagcccagaattccgcgcaaataaagggtttttcgttatttccaaaagaaacgggattattcttctgtaccaatatcagtcagtattcctgttacctctttatatggcatcgtatatcgctgtgaaagataacgcatagatgcagctaattcgccatccggcccaccgaactgacttataatgatcttcgccagtttcggattcgtctgggttatcttcacagg

SEQ ID NO: 30680 - DNA, 260 bp, Unknown
  Description of Unknown: RightRegion for integrase B4681 sequence
tttattgaacagattattttttatgatcgagacaatgtgcagatccgatataaaatgtgatatcggcaatgtgcagatccgatataaagccccagttttaggttgttgcaaaggtgtttgattctgcgtcatgtgtagacagtttggattggaaggattacggcgtagattctattattcataccgttttagatcataagcatctcggaaacggttccatcattctctgtcataacggtgctaaatatactgccgaggct

SEQ ID NO: 30681 - DNA, 260 bp, Unknown
  Description of Unknown: RightRegion for integrase B4682 sequence
attgtgttctacaaggatacaaatacccttgaattccactattacctcatggtagaataaagcctgtaacccgcataaatgctggatttatagaatagtagccgtatttccgaccatcccccaccatgccccgcatccaatacgatcaatggcataaaaaagctcccgcatatccttttgtttcatgatatgcgggagcttccccatttagatatttatttcaaaagtgctgccgtcacttcctgaggtattacaaattc

SEQ ID NO: 30682 - DNA, 260 bp, Unknown
  Description of Unknown: RightRegion for integrase B4683 sequence
cggaaccgtgacggtatgagcgtatatacttttactattgctataaatttagcagcttaattactatactaaaaggcaggattcgctcctgccttttctatttcccttgttaattttttatcgctacatacaatgcacacccagcaataacgtaggctatattacgctgtcttttaatttgttttcgctttaggttgaactctttttctaactgagccaaggattgattcgcattctgcaataagctctcctgctctttc

SEQ ID NO: 30683 - DNA, 260 bp, Unknown
  Description of Unknown: RightRegion for integrase B4684 sequence
attgtgttctacaaggatacaaatacccttgaattccactattacctcatggtagaatgaatcctgtaacccgcataaacactgaggttatagaatagtagctgtatttccggccatcccccaccatgccccgcatccaatacaatcaatgacataaaaaaactcccgcatatccttttgtttcatgatatgcgggagtttccccatttagatattttttgcttactttaaaattgctgccgtcacttcctgcggaatca

SEQ ID NO: 30684 - DNA, 77 bp, Unknown
  Description of Unknown: RightRegion for integrase B4685 sequence
aattgttcgactgggaatcatctggtccgagtggcgagaatcgaactcacggcctcttgaaccccattcaagcgcgc

SEQ ID NO: 30685 - DNA, 260 bp, Unknown
  Description of Unknown: RightRegion for integrase B4686 sequence
attgtgttctacaaggatacaaatacccttgaattccactattacctcatggtagaatgaatcctgtaacccgcataaacactggggttatagaatagtagctgtatttccgaccatcccccaccgtgccccgcatccaatacgatcaatggcataaaaaaactcccgcatatccttttgtttcatgatatgcgggagtttccccatttagatatttattttaaaagtgctgccgtcacttcctgagggattacaaattc

SEQ ID NO: 30686 - DNA, 260 bp, Unknown
  Description of Unknown: RightRegion for integrase B4687 sequence
attgtgttctacaaggatacaaatacccttgaattccactattacctcatggtagaataaagcctgtaacccgcataaatgctggatttatagaatagtagccgtatttccgaccatcccccaccatgccccgcatccaatacaatcaatgacataaaaaaactcccgcatatccttttgtttcatgatatgcgggagtttccccatttagatattttttgcttactttaaaattgctgccgtcacttcctgcggaatca

SEQ ID NO: 30687 - DNA, 260 bp, Unknown
  Description of Unknown: RightRegion for integrase B4688 sequence
tttattgaacagattattttttatgatcgagacaatgtgcagatccgatataaaatgtgatatcggcaatgtgcagatccgatataaagccccagttttaggctattgcaaaggtgtttgattctgcgtcatgtgtagacagtttggattggaaggattacggcgtagattctattattcataccgttttagatcataagcatctcggaaacggttccatcattctctgtcataacggtgctaaatatactgccgaggct

SEQ ID NO: 30688 - DNA, 109 bp, Unknown
  Description of Unknown: RightRegion for integrase B4689 sequence
attgtgttctacaaggatacaaatacccttgaattccactattacctcatggtagaataaagcctgtaacccgcataaatgctggatttatagaatagtagccgtattt

SEQ ID NO: 30689 - DNA, 260 bp, Unknown
  Description of Unknown: RightRegion for integrase B4690 sequence
ggtcatctgaatgagcctaactttgaattgaccataaagcccagaattccgcgcaaataaagggtttttcgttatttccaaaagaaacgggattattctttatcccaattcttttggaaatgaattacataataatatgaagaaactcgttttttcttctatcaaaatactatataaaatagatgatacaatattcaatcccccggagtcatttactccgggggatctatccgaaaccataatgatcgcttcggccagtt

SEQ ID NO: 30690 - DNA, 260 bp, Unknown
  Description of Unknown: RightRegion for integrase B4691 sequence
attgtgttctacaaggatacaaatacccttgaatttcactattacctcatggtagaatgaatcctataacccgcataaacactggggttatagaatagtagctgtatttccggtcatcccccaccatgccccgcatccaatacaatcaatgacataaaaaaactcccgcatatccttttgtttcatgatatgcgggagtttccccatttagatattttttgcttactttaaaattgctgccgtcacttcctgcggaatca

SEQ ID NO: 30691 - DNA, 70 bp, Unknown
  Description of Unknown: RightRegion for integrase B4692 sequence
gcgcaaagtcctgccaaaaggggctgttgcacatcctctaaaaaagaaagaccgaagtaaaagccaaaaa

SEQ ID NO: 30692 - DNA, 260 bp, Unknown
  Description of Unknown: RightRegion for integrase B4693 sequence
cataagcagccgatttttttctttgcttcttgcagaagggcgagaataggacggcagtgaataccgtgccctttggcacggtagagccgtcctgaccgacgagcgtcgagcgaggagaaagagtccttctgcccctgccaaaaaggtcggttgcaaaagcagccgatttttttgctctttgcagaaggacatttttccaattccagttttttcaaaatgcgcaactaaattcagttgcatttttatctttttgtgctata

SEQ ID NO: 30693 - DNA, 260 bp, Unknown
  Description of Unknown: RightRegion for integrase B4694 sequence
attgtgttctacaaggatacaaatacccttgaattccactattacctcatggtagaataaagcctgtaacccgcataaatgctggatttatagaatagtagccgtatttccggccatcccccaccatgccccgcatccaatacaatcaatgacataaaaaaactcccgcatatccttttgtttcatgatatgcgggagtttccccatttagatattttttgcttactttaaaattgctgccgtcacttcctgcggaatca

SEQ ID NO: 30694 - DNA, 260 bp, Unknown
  Description of Unknown: RightRegion for integrase B4695 sequence
attgtgttctacaaggatacaaatacccttgaattccactattacctcatggtagaataaagcctgtaacccgcataaatgctggatttatagaatagtagccgtatttccgaccatcccccaccatgccccgcatccaatacgatcaatgacataaaaaactcccgcatatccttttgtttcatgatatgcgggagtttccccatttagatattatttgcttactttaaaattgctgccgtcacttcctgcggaatcac

SEQ ID NO: 30695 - DNA, 183 bp, Unknown
  Description of Unknown: RightRegion for integrase B4696 sequence
attgtgttctacaaggatacaaatacccttgaattccactattatctcatggtagactaatctctgtaatccgcataaatgctggctttacagaatagtagctgtatttccgaccatcccccaccgtgccccgcatccaaaacgatcaatggcataaaaaaactcccgcatatcctcttggtt

SEQ ID NO: 30696 - DNA, 260 bp, Unknown
  Description of Unknown: RightRegion for integrase B4697 sequence
atcgtgttctacaaggatacaaatacccttgaattccactattacctcatggtagaatgaatcctgtaagccgcataaatgcgagctttatgatatagtagctgtatttccgaccatcccccaccgtgccccgcatccaatacgatcaatggcataaaaaaactcccgcatatccttttgtttcatgatatgcgggagtttccccatttagatattttttgcttactttaaaattgctgccgtcacttcctgcggaatca

SEQ ID NO: 30697 - DNA, 260 bp, Unknown
  Description of Unknown: RightRegion for integrase B4698 sequence
ggtttccgactgaattgcgggctaacactgaaggaggagttatgtacgggtacagaataattaacggtaaagccgttattgacgaaaaagaagctggtgtgatcagagagatttttaacgggtatatttctggattgagccttcaggatgctgctgagaatgcaggaagctcgatggttcatagcatggtgaaacgcatcatccgaaatttctgttatatcggtgatgactattatcccgcaatcgtcagccgacagact

SEQ ID NO: 30698 - DNA, 80 bp, Unknown
  Description of Unknown: RightRegion for integrase B4699 sequence
agttgttcgactgggaatcatctggtccgagtggcgagaatcgaactcacggcctcttgaaccccattcaagcgcgctac

SEQ ID NO: 30699 - DNA, 260 bp, Unknown
  Description of Unknown: RightRegion for integrase B4700 sequence
attgtgttctacaaggatacaaatacccttgaattccactattacctcatggtagaataaagcctgtaacccgcataaatgctggatttatagaatagtagccgtatttccgaccatcccccaccgtgccccgcatccaatacgatcaatggcataaaaaaactcccgcatatccttttgtttcatgatatgcgggagtttccccatttagatatttattttaaaagtgctgccgtcacttcctgagggattacaaattc

SEQ ID NO: 30700 - DNA, 188 bp, Unknown
  Description of Unknown: RightRegion for integrase B4701 sequence
caaaagcagccgatttttttattcgcttcttgcagaaggacgagaataggacggcagtgaataccgtgccctttggcacggtagagccgtcctgaccgacgagcgtcgagcgaggagaaagagtccttctgcccctgccaaaaggtcggttgcaaaagcagccgatttttttattcgcttcttgcaga

SEQ ID NO: 30701 - DNA, 260 bp, Unknown
  Description of Unknown: RightRegion for integrase B4702 sequence
agttgttcgactgggaatcatctggtccgagtggcgagaatcgaactcacggcctcttgaaccccattgtgcttctctcaaaaacgcaatggacactccgataccacttgtacgcagtatcatcaaatttcaaaattattttatcattctgtttcgttagatgtcaagatgtttcgtttcttttgtggtcaaattgtggtcaaccgaccctgacaaatgaccattctcccctactaagttacatggcgcaattccgattt

SEQ ID NO: 30702 - DNA, 260 bp, Unknown
  Description of Unknown: RightRegion for integrase B4703 sequence
atcgtgttctacaaggatacaaatacccttgaattccactattacctcatggtagaataaatcctgtaacccgcataaatgctggggttatagaatagtagccgtatttccgaccatcccccaccgtgacccgcatccaaaacgatcaatggcataaaaaaactcccgcatatcctcttggttcatgatatgcgggagttttggcttttagagatattttatttccaggaaaattcccctttgactgcttctgtatattg

SEQ ID NO: 30703 - DNA, 260 bp, Unknown; identical to SEQ ID NO: 30686
  Description of Unknown: RightRegion for integrase B4704 sequence

SEQ ID NO: 30704 - DNA, 260 bp, Unknown
  Description of Unknown: RightRegion for integrase B4705 sequence
attgtgttctacaaggatacaaatacccttgaattccactattacctcatggtagaataaagcttgtaacccgcataaatgctggatttatagaatagtagccgtatttccgaccatcccccaccgtgacccgcatccaacacgatcaatggcataaaaaactcccgcatatctttttgtttcatgatatgcggaagttttcccttttagatattcttttgtctactttaaaagtcctgccgtcactttctgcgggatca

SEQ ID NO: 30705 - DNA, 260 bp, Unknown
  Description of Unknown: RightRegion for integrase B4706 sequence
attgtgttctacaaggatacaaatacccttgaattccactattacctcatggtagaataaagcctgtaacccgcataaatgctggatttatagaatagtagccgcatttccgaccatcccccaccatgccccgcatccaatacaatcaatgacataaaaaaactcccgcatatccttttgtttcatgatatgcgggagtttccccatttagatattttttgcttactttaaaattgctgccgtcacttcctgcggaatca

SEQ ID NO: 30706 - DNA, 260 bp, Unknown
  Description of Unknown: RightRegion for integrase B4707 sequence
cacgaactaaataatctcattttttatgaaaggtacttctgtatccgcattgctgtataaggatagcccgccgagttttaagctcgacgggcttttctttttggccttccggaaaaagccgatggtttgaaacaaatttatgatatatgttggcacaagatatcaattgttttcatcacggagggtcgttagattgtctgcggctttgctgaaagcagccgctggtggggactacgggatttgaacctgtgacgagacgg

SEQ ID NO: 30707 - DNA, 260 bp, Unknown
  Description of Unknown: RightRegion for integrase B4708 sequence
attgtgttctacaaggatacaaatacccttgaattccactattacctcatggtagaatgaatcctgtaacccgcataaacactggggttatagaatagtagctgtatttccgaccatcccccaccatgccccgcatccaatacgatcaatggcataaaaaagctcccgcatatccttttgtttcatgatatgcgggagcttccccatttagatatttatttcaaaagtgctgccgtcacttcctgaggtattacaaattc

SEQ ID NO: 30708 - DNA, 260 bp, Unknown
  Description of Unknown: RightRegion for integrase B4709 sequence
ttcttatttttccctcatacttttgtctatgtttcttatgaaaagataccgtccgcctgatttattatatcataccgtgatgagaataggaatttatatttccttctgaaatgaaaaaagcggagaaaagcaatactcccctccgcttataattcagattaagaaacgtatgtctttccgccgcttactgcagcgatccatccggagggaatccgcatccagatatccgctcctacctgcttgatttcctggcaggttac

SEQ ID NO: 30709 - DNA, 260 bp, Unknown
  Description of Unknown: RightRegion for integrase B4710 sequence
attgtgttctacaaggatacaaatacccttgaattccactattacctcatggtagaatgaatcctgtaacccgcataaacactggggttatagaatagtagctgtatttccggccatcccccaccatgccccgcatccaatacaatcaatgacataaaaaaactcccgcatatccttttgtttcatgatatgcgggagtttccccatttagatattttttgcttactttaaaattgctgccgtcacttcctgcggaatca

SEQ ID NO: 30710 - DNA, 260 bp, Unknown
  Description of Unknown: RightRegion for integrase B4711 sequence
tttattgaacagattattttttatgatcgagacaatgtgcagatccgatataaaatgtgatatcggcaatgtgctgatccgatataaagccccagttttaggctattgcaaaggtgtttgattctgcgtcatgcgtagacagtttggattggaaggattacggcgtagattctattcttcataccgttttagatcataagcatctcggaaacggttccatcattctctgtcataacggtgctaaatatactgccgaggct

SEQ ID NO: 30711 - DNA, 260 bp, Unknown
  Description of Unknown: RightRegion for integrase B4712 sequence
tttattgaacagattattttttatgatcgagacaatgtgcagatccgatataaaatgtgatatcagcaatgtgcagatccgatataaagccccagttttaggttgttgcaaaggtgtttaattctgcgtcatgtgtagacagtttggattggaaggattacggcgtagattctattattcataccgttttagatcataagcatctcggaaacggttccatcattctctgtcataacggtgctaaatatactgccgaggct

SEQ ID NO: 30712 - DNA, 260 bp, Unknown
  Description of Unknown: RightRegion for integrase B4713 sequence
ggtcatctgaatgagcctaactttgaattgactataaagcccagaatcccgcgcaaataaagggttttttgttatttccaaaagaaacgggattattcttctgtaccaatatcagtcagtatccctgttacctctttatatggcatcgtatatcgctgtgaaagataacgcatagatgcagctaattcgccatccggcccaccgaactggcttataatgatcttcgccagtttcggattcgtctgggttatcttcacagg

SEQ ID NO: 30713 - DNA, 260 bp, Unknown
  Description of Unknown: RightRegion for integrase B4714 sequence
gcgaaagcagccgattttttattgacttcttgcagaaggacgagaataggacggcagtgaataccgtgccctttggcacggtagagccgtcctgaccgacgagcgtcgagcgaggagaaagagtccttctgcccctgccaaaaaggtcggttgcaaaagcagccgatttttttttgctctttgcagaaggacatttttccaattccagttttttcaaaatgcgcaactaaattcagttgcatttttatctttttgtgcta

SEQ ID NO: 30714 - DNA, 260 bp, Unknown
  Description of Unknown: RightRegion for integrase B4715 sequence
attgtgttctacaaggatacaaatacccttgaattccactattacctcatggtagaataaagcctgtaacccgcataaatgctggatttatagaatagtagccgtatttccgaccatcccccaccgtgacccgcatccaacacgatcaatggcataaaaaactcccgcatatctttttgtttcatgatatgcgggagttttcccttttagatattcttttgtctactttaaaagtcctgccgtcactttctgcgggatca

SEQ ID NO: 30715 - DNA, 109 bp, Unknown
  Description of Unknown: RightRegion for integrase B4716 sequence
ggtcatctgaatgagcctaattttgaattgaccataaagcccagaattccgcgcaaataaagggtttttcgttatttccaaaagaaacgggattattcttctgtaccaa

SEQ ID NO: 30716 - DNA, 131 bp, Unknown
  Description of Unknown: RightRegion for integrase B4717 sequence
attgtgttctacaaggatacaaatacccttgaattccactattacctcatggtagaatgaatcctggggagtatcctaaagtttgtgtaaacctccaaactgatgtaagataaaattactcagtttggagg

SEQ ID NO: 30717 - DNA, 100 bp, Unknown
  Description of Unknown: RightRegion for integrase B4718 sequence
accaaaatgatgacgggaaattccgagtgttcgcgttgcgaacgtttggtgacccggtagggattcgaaccctagacctactgattcgtagtcagtcact

SEQ ID NO: 30718 - DNA, 77 bp, Unknown
  Description of Unknown: RightRegion for integrase B4719 sequence
agttgttcgactgggaatcatctggtccgagtggcgagaatcgaactcacggcctcttgaaccccattcaagcgcgc

SEQ ID NO: 30719 - DNA, 260 bp, Unknown; identical to SEQ ID NO: 30686
  Description of Unknown: RightRegion for integrase B4720 sequence

SEQ ID NO: 30720 - DNA, 260 bp, Unknown
  Description of Unknown: RightRegion for integrase B4721 sequence
tttacgtcactatataaaatattagaaaaggctgtatttacgacaactggagtgttttaagcactccttttttaattatgtactttgttactagactcagttgaaacacctgctccaccgaagaatactatattattactttctttaagtatttgagtcaattgttctatttcattattcataaaatcatctccataaatatttataattttattattacacaaatataataaaaaataaaacatacagaaatttcgtgt

SEQ ID NO: 30721 - DNA, 260 bp, Unknown
  Description of Unknown: RightRegion for integrase B4722 sequence
ggctccaccatgcaaaaacgccatcccatttgggatggcgtttttgcatggctgcgctgaggggcgcgagaaaccctcgggttcgaccgactggatttcgcggcgtgtcaacgccgcaattttgcgctttgcgcaaaatcaaaaagaaaatccggtcggcacggaggcggcgaagctgccggagtattcccctcggctccatcccgccacagaaaggctcccctcccaggggagctgtcagcgaagctgactgagaggtt

SEQ ID NO: 30722 - DNA, 260 bp, Unknown
  Description of Unknown: RightRegion for integrase B4723 sequence
agttgttcgactgggaatcatctggtccgagtggcgagaatcgaactcacggcctcttgaaccccattgtgcttctctcgaaaacacaatgtacaatccgatactgcctagactcagtatcgttaaatttcaaatgcattataccattctgtttcattggatgtcaagacgtttcattccttttgtggtcaaattgtggtcaaacgaccccgacaaatgacctttctcccccagctaagttacatcgcgcaatttcgatt

SEQ ID NO: 30723 - DNA, 260 bp, Unknown
  Description of Unknown: RightRegion for integrase B4724 sequence
ggtcatctgaatgagcctaactttgaattgaccataaagccaagaatcccgcgcaagtaaagggttttttgttatttccaaaagaaacgggattattcttctgtaccaatatcagtcagtatccctgttacctctttatatggcatcgtatatcgctgtgaaagataacgcatagatgcagctaattcgccatccggcccaccgaactggcttataatgatcttcgccagtttcggattcgtctgggttatcttcacagg

SEQ ID NO: 30724 - DNA, 109 bp, Unknown
  Description of Unknown: RightRegion for integrase B4725 sequence
ggtcatctgaatgagcctaactttgaattgaccataaagccaagaatcccgcgcaagtaaagggttttttgttatttccaaaagaaacgggattattcttctgtaccaa

SEQ ID NO: 30725 - DNA, 260 bp, Unknown
  Description of Unknown: RightRegion for integrase B4726 sequence
attgtgttctacaaggatacaaatacccttgaattccactattacctcatggtagaatgaatcctgtaacccgcataattgctggatttatagaatagtagctgtatttccgaccatcccccaccatgccccgcatccaatacaatcaatgacataaaaaaactcccgcatatccttttgtttcatgatatgcgggagtttccccatttagatattttttgcttactttaaaattgctgccgtcacttcctgcggaatca

SEQ ID NO: 30726 - DNA, 109 bp, Unknown
  Description of Unknown: RightRegion for integrase B4727 sequence
ggtcatctgaatgagcctaactttgaattgaccataaagcccagaatcccgcgcaaataaagggttttttgttatttccaaaagaaacgggattattcttctgtaccaa

SEQ ID NO: 30727 - DNA, 206 bp, Unknown
  Description of Unknown: RightRegion for integrase B4728 sequence
atcgtgttctacaaggatacaaatacccttgaattccactattacctcatggtagaataaatcctgtaacccgcataaatgctggggttatagaatagtagccgtatttccgaccatcccccaccatgccccgcatccaatacaatcaatgacataaaaaaactcccgcatatccttttgtttcatgatatgcgggagtttcccca

SEQ ID NO: 30728 - DNA, 109 bp, Unknown
  Description of Unknown: RightRegion for integrase B4729 sequence
tttattgaacagattattttttatgatcgagacaatgtgcagatccgatataaaatgtgatatcggcaatgtgcagatccgatataaagccccagttttagcccattgc

SEQ ID NO: 30729 - DNA, 74 bp, Unknown
  Description of Unknown: RightRegion for integrase B4730 sequence
aattgttcgactgggaatcatctggtccgagtggcgagaatcgaactcacggcctcttgaaccccattcaagcg

SEQ ID NO: 30730 - DNA, 260 bp, Unknown
  Description of Unknown: RightRegion for integrase B4731 sequence
attgtgttctacaaagatacaaatacccttgaattccactattacctcatggtagaataactgctggaagccgcataaatgcaggctttgtgatatagtagccgtatttccgaccatcccccaccgtgacccgcatccaacacgatcaatggcataaaaaactcccgcatatctttttgtttcatgatatgcgggagttttcccttttagatattcttttgtctactttaaaagtcctgccgtcactttctgcgggatca

SEQ ID NO: 30731 - DNA, 260 bp, Unknown
  Description of Unknown: RightRegion for integrase B4732 sequence
attgtgttctacaaggatacaaatacccttgaattccactattacctcatggtagaatgaatcctgtaacccgcataaacactgtggttatagaatagtagctgtatttccgaccatcccccaccgtgacccgcatccaaaacgatcaatggcataaaaaaactcccgcatatctttttgtttcatgatatgcgggagttttcccttttagatattcttttgtctactttaaaagtcctgccgtcactttctgcgggatc

SEQ ID NO: 30732 - DNA, 260 bp, Unknown
  Description of Unknown: RightRegion for integrase B4733 sequence
attgtattctacaaagatacaaatacccttgaattccactattacctcatggtagaatgaatcccgtaacccgtataaacactggggttatagaatagtagctgtatttccgaccatcccccaccatgccccgcatccaatacaatcaatgacataaaaaaactcccgcatatccttttgtttcatgatatgcgggagtttccccatttagatattttttgcttactttaaaattgctgccgtcacttcctgcggaatca

SEQ ID NO: 30733 - DNA, 260 bp, Unknown
  Description of Unknown: RightRegion for integrase B4734 sequence
agttgttcgactgggaatcatttggtccgagtggcgagaatcgaactcacggcctcttgaaccccattgtgcttctctcaaaaacgcaatggacactccgataccacttgtacgcagtatcatcaaatttcaaaattattttatcattctgtttcgttagatgtcaagatgtttcgtttcttttgtggtcaaattgtggtcaaccgaccctgacaaatgaccattctcccctactaagttacatggcgcaattccgattt

SEQ ID NO: 30734 - DNA, 260 bp, Unknown
  Description of Unknown: RightRegion for integrase B4735 sequence
atcaaagtttctcacaactggttttgcatcataacactgattagcacgcaaaaaagttagcaaaattcaaattcacgcttgcgttactatggggtctaccctataatagtagacacaaggaagaaaggaggtggttaaaatggatgacaaaatatgggacttggcagtatccatcatcggcataatccttgcaaaggcgctcgatgaaggaatccaagccctaaaagaaaagacctctcgcaagccgggaaagcatgaga

SEQ ID NO: 30735 - DNA, 260 bp, Unknown
  Description of Unknown: RightRegion for integrase B4736 sequence
ggtcatctgaatgagcctaactttgaattgaccataaagcccagaattccgcgcaaataaagggtttttcgttatttccaaaagaaacgggattattcttctgtaccaatatcagtcagtatccctgttacctctttatatggcatcgtatatcgctgtgaaagataacgcatagatgcagctaattcgccatccggcccaccgaactggcttataatgatcttcgccagtttcggattcgtctgggttatcttcacagg

SEQ ID NO: 30736 - DNA, 260 bp, Unknown
  Description of Unknown: RightRegion for integrase B4737 sequence
cacgaactaaataaccttattttttatgaaagatacttctgtatccgcattgctgtatgatgatagcccgccgagcgcatgctcgacgggcttttctttttagccttctgggaaaagccgattggttagaaacaaatttatgatatatgttggcacaagatatcagttgttttcgtcccggaaggctgttagattgtctgcggctttgctgaaagcagccgctggtggggactacaggatttgaacctgtgcctggacgg

SEQ ID NO: 30737 - DNA, 260 bp, Unknown
  Description of Unknown: RightRegion for integrase B4738 sequence
attgtcttttacaaaaatgaggattcctttgaatttcattactatttgatgatagattaattcctgaaagcccgcataaatgcatcctttaagcactgtagctgtattttgcatcacgctccgccatgaccggcatcaagtgctacaagtgccatataaaaagacctcccacataactttctataagctatgcggaaggtctgattctgtgtctgtcctgttacggtttttaatttcatatccgaacttcttgtcatact

SEQ ID NO: 30738 - DNA, 260 bp, Unknown
  Description of Unknown: RightRegion for integrase B4739 sequence
cggactcggattgcagtaagctcagacacatggaaaatatcagcaaatcttgcggcttaactataagggcaggcgagaacctgcccttagctcattatagcatctgtgccagccaagcgtcaagaactttcccctctgatgcgtccgggtcgtttatgtacgccttagccatacgcacgtagttgttggtgtcgcttccaagaatttcagcaaaatcactatgcagcatattcataacatagtaccaatcagctttacaa

SEQ ID NO: 30739 - DNA, 109 bp, Unknown
  Description of Unknown: RightRegion for integrase B4740 sequence
atctgcggatgctgcttttttccgaaattgcgcggcacaagcagccgctttcatatgtgaatatcactgccaccgggtaggaatgcaattcgcattcgtttgtacatcg

SEQ ID NO: 30740 - DNA, 109 bp, Unknown
  Description of Unknown: RightRegion for integrase B4741 sequence
ggtcatctgaatgagcctaactttgaattgaccataaagcccagaatcccgcgcaaataaagggttttttcgttatttccaaaagaaacgggattattcttctgtacca

SEQ ID NO: 30741 - DNA, 260 bp, Unknown
  Description of Unknown: RightRegion for integrase B4742 sequence
cacgaactaaataacctcattttctttgacaaatacttctgtatccgcattgctgtatgatgatagcccgccgagcgcatgctcgacgggcttttttttgagccttccggtgaaagccgattggttccgaacaaacttatgagatatatgctggcacaagatatcgaatgtttgcgacccggaaggctgttagattgtttgcggctttgctgaaagcagtcgcaagtgagtgtggacttacaacacactcactatcggag

SEQ ID NO: 30742 - DNA, 260 bp, Unknown
  Description of Unknown: RightRegion for integrase B4743 sequence
attgtgttctacaaggatacaaatacccttgaattccactattacctcatggtagaataaagcttgtaacccgcataaatgctggatttatagaatagtagccgtatttccgaccatcccccaccatgccccgcatccaatacgatcaatggcataaaaaagctcccgcatatccttttgtttcatgatatgcgggagtttccccatttagatattttttgcttactttaaaattgctgccgtcacttcctgcggaatca

SEQ ID NO: 30743 - DNA, 260 bp, Unknown
  Description of Unknown: RightRegion for integrase B4744 sequence
atcgtgttctacaaggatacaaatacccttgaattccactattacctcatggtagaataaatcctgtaacccgcataaatgctggggttatagaatagtagccgtatttccgaccatcccccaccatgccccgcatccaatacaatcaatgacataaaaaaactcccgcatatccttttgtttcatgatatgcgggagtttccccatttagatattttttgcttactttaaaattgctgccgtcacttcctgcggaatca

SEQ ID NO: 30744 - DNA, 68 bp, Unknown
  Description of Unknown: RightRegion for integrase B4745 sequence
gaaagttcgtctgagatgcgtctggtccgagtggcgagaatcgaactcacggcctcttgaaccccatt

SEQ ID NO: 30745 - DNA, 260 bp, Unknown
  Description of Unknown: RightRegion for integrase B4746 sequence
attgtgttctacaaggatacaaatacccttgaattccactattacctcatggtagaatgaatcctgtaacccgcataaacactggggttatagaatagtagctgtatttccgaccatcccccaccatgccccgcatccaatacaatcaatgacataaaaaaactcccgcatatccttttgtttcatgatatgcgggagtttccccatttagatattttttgcttactttaaaattgctgccgtcacttcctgcggaatca

SEQ ID NO: 30746 - DNA, 260 bp, Unknown; identical to SEQ ID NO: 30701
  Description of Unknown: RightRegion for integrase B4747 sequence

SEQ ID NO: 30747 - DNA, 109 bp, Unknown
  Description of Unknown: RightRegion for integrase B4748 sequence
ggcaatttcactcttaacgtgattccgctctttccggaaataaaaacaggagcagaatgactataatgacgccggacgtatacatacggccctccgctggcggtttcgc

SEQ ID NO: 30748 - DNA, 109 bp, Unknown
  Description of Unknown: RightRegion for integrase B4749 sequence
attgtgttctacaaggatacaaatacccttgaattccactattacctcatggtagaataaagcttgtaacccgcataaatgctggatttatagaatagtagccgtattt

SEQ ID NO: 30749 - DNA, 260 bp, Unknown; identical to SEQ ID NO: 30679
  Description of Unknown: RightRegion for integrase B4750 sequence

SEQ ID NO: 30750 - DNA, 260 bp, Unknown
  Description of Unknown: RightRegion for integrase B4751 sequence
ggctccaccatgcaaaaacgccatcccatttgggatggcgtttttgcatggctgcgctgaggggcgcgagaaacccttgggttcgaccgactggatttcgcggcgtgtcaacgccgcaattttgcgctttgcgcaaaatcaaaaagaaaatccagtcggcacggaggcggcgaagccgccggagtattcccctcagctccatcccgccacagaaaggctcccctcccaggggagctgtcagcgaagctgactgagaggtt

SEQ ID NO: 30751 - DNA, 109 bp, Unknown
  Description of Unknown: RightRegion for integrase B4752 sequence
ggtcatctgaatgagcctaactttgaattgaccataaagcccagaattccgcgcaaataaagggtttttcgttatttccaaaagaaacgggattattcttctgtaccaa

SEQ ID NO: 30752 - DNA, 260 bp, Unknown
  Description of Unknown: RightRegion for integrase B4753 sequence
atcgtgttctacaaggatacaaatacccttgaattccactattacctcatggtagaatgaatcccgtaacccgcataaacactggggttatagaatagtagctgtatttccgaccatcccccaccatgccccgcatccaatacaatcaatgacataaaaaaactcccgcatatccttttgtttcatgatatgcgggagtttccccatttagatattttttgcttactttaaaattgctgccgtcacttcctgcggaatca

SEQ ID NO: 30753 - DNA, 76 bp, Unknown
  Description of Unknown: RightRegion for integrase B4754 sequence
agttgttcgactgggaatcatctggtccgagtggcgagaatcgaactcacggcctcttgaaccccattcaagcgcg

SEQ ID NO: 30754 - DNA, 260 bp, Unknown
  Description of Unknown: RightRegion for integrase B4755 sequence
aaaataaatccacaaagcaaagatgattttaagcttactatttatcctaaaatatattaatataccaacataaattatttttttattttatgcatgtatcatttacattttgataaacgaagaggaacaccagcatgtagtacaggtggatatcctcttataaaacaaggttcaagaggagcttatgtatgtattgcacaagataatttaaacacattaggttatagaacaggtggattagatggagtatttggtgcaca

SEQ ID NO: 30755 - DNA, 260 bp, Unknown
  Description of Unknown: RightRegion for integrase B4756 sequence
tttattgaacagattattttttatgatcgagacaatgtgcagatccgatataaaatatgatatcggcaatgtgcagatccgatataaagccccagttttagcccattgcaaaggtgtttgattctgcgtcatgtgtagacagtttggattggaaggattacggcgtagattctattcttcataccgttttagatcataagcatctcggaaacggttccatcattctctgtcataacggtgctaaatatactgccgaggct

SEQ ID NO: 30756 - DNA, 260 bp, Unknown
  Description of Unknown: RightRegion for integrase B4757 sequence
agttgttcgactgggaatcatctggtccgagtggcgagaatcgaactcacggcctcttgaaccccattgtgcttctctcgaaaacacaatgtacaatccgatactgcctagactcagtatcgttaaatttcaaatgtattatatcattctgtttcattggatgtcaagacgtttcattccttttgtggtcaaattgtggtcaaacgaacccgacaaatgacctttctcccccggctaagttacatcgcgcaatttcgatt

SEQ ID NO: 30757 - DNA, 109 bp, Unknown
  Description of Unknown: RightRegion for integrase B4758 sequence
ggtcatctgaatgagcctaactttgaattgaccataaagccaagaatcccgcgcaaataaagggttttttgttatttccaaaagaaacgggattattcttctgtaccaa

SEQ ID NO: 30758 - DNA, 109 bp, Unknown
  Description of Unknown: RightRegion for integrase B4759 sequence
ggtcatctgaatgagcctaactttgaattgaccataaagcccagaattccgcgcaaataaagggttttttcgttatttccaaaagaaacgggattattcttctgtacca

SEQ ID NO: 30759 - DNA, 109 bp, Unknown
  Description of Unknown: RightRegion for integrase B4760 sequence
ggtcatctgaatgagcctaactttgaattgaccataaagcccagaatcccgcgcaaataaagggtttttcgttatttccaaaagaaacgggattattcttctgtaccaa

SEQ ID NO: 30760 - DNA, 260 bp, Unknown
  Description of Unknown: RightRegion for integrase B4761 sequence
tttattgaacagattattttttatgatcgagacaatgtgcagatccgatataaaatgtgatatcggcaatgtgcagatccgatataaagccccagttttaggttattgcaaaggcgtttgattctgcgtcatgtgtagacagtttggattggaaggattacggcgtagattctattcttcataccgttttagatcataagcatctcggaaacggttccatcattctctgtcataacggtgctaaatatactgccgaggct

SEQ ID NO: 30761 - DNA, 260 bp, Unknown
  Description of Unknown: RightRegion for integrase B4762 sequence
attgtgttctacaaggatacaaatacccttgaattccactattacctcatggtagaataaagcctgtaacccgcataaatgctggatttgtagaatagtagccgtatttccgaccatcccccaccgtgacccgcatccaacacgatcaatggcataaaaaactcccgcatatctttttgtttcatgatatgcgggagttttcccttttagatattcttttgtctactttaaaagtcctgccgtcactttctgcgggatca

SEQ ID NO: 30762 - DNA, 109 bp, Unknown; identical to SEQ ID NO: 30726
  Description of Unknown: RightRegion for integrase B4763 sequence

SEQ ID NO: 30763 - DNA, 260 bp, Unknown
  Description of Unknown: RightRegion for integrase B4764 sequence
acccgatgggataccagcaagccaaccttggagattcacttgaaagattttcaaaactgaccataacagacaacatcatgccgcagattcctctgtgccgatatcgctcagcagcgcctgaagacgagcatccggcatggtgtatcgctgtgacagatagcgcagcgccgcagccatctctccatccggaccgcccagctgtgagatgatcaccgctgctgccttcgcgtccggacatgtgatgttcaccggaaactgca

SEQ ID NO: 30764 - DNA, 260 bp, Unknown
  Description of Unknown: RightRegion for integrase B4765 sequence
tacgaactaaacaagctgattttccacgaaagatacttctgtatccgcattgctgtatgattatagcccgccgagcacatgcccgacgggcttttcttttgagccttccggtaaaagccgattggtttgaagcaaatttatgatatatgttggcacaagatatcagttgtttgcaatccggagggccgttaaattgtttgcggctttagccgctggtggggactacaggatttgaacctgtgacgagacggttatgagcc

SEQ ID NO: 30765 - DNA, 109 bp, Unknown; identical to SEQ ID NO: 30726
  Description of Unknown: RightRegion for integrase B4766 sequence

SEQ ID NO: 30766 - DNA, 109 bp, Unknown; identical to SEQ ID NO: 30726
  Description of Unknown: RightRegion for integrase B4767 sequence

SEQ ID NO: 30767 - DNA, 260 bp, Unknown
  Description of Unknown: RightRegion for integrase B4768 sequence
aacatatttgtaaacaaggattggttcacaatagttttcgacataaaagagataggctagtgcctatctcttttttcttacgctccgaaacccttgatatataaggctttcagaccctcgccgtttatttgcgttttaaggcggttgtttttgccttgtggacatattataccttgaattttgttctaggctgtccgtttccacatgtttacaccgatgtaaggctgataatttgcgttattattcccttctatgttacc

SEQ ID NO: 30768 - DNA, 260 bp, Unknown
  Description of Unknown: RightRegion for integrase B4769 sequence
atctgcggatgctgcttttttccgaaatcgcgcggcacaagcagccgctttcatatgtgaatatcactgccaccgggtaggaatgcaattcgcattcgtttgtacatcgttaggtctgagaagatgtgcatgcgaatgcttatttttttggaggttgtatgaaaaaaattgaaggactgcaccgctatttcaccaagggcgagcgagcgctgtggtttggttccgtatttgtgatcattgcggctttttattttttcgac

SEQ ID NO: 30769 - DNA, 260 bp, Unknown
  Description of Unknown: RightRegion for integrase B4770 sequence
ggtcatctgaatgagcctaactttgaattgaccataaagcccagaattccgcgcaaataaaggttttttcgttatttccaaaagaaacgggattattcttctgtaccaatatcagtcagtattcctgttacctctttatatggcatcgtatatcgctgtgaaagataacgcatagatgcagctaattcgccatccggcccaccgaactgacttataatgatcttcgccagtttcggattcgtctgggttatcttcacagg

SEQ ID NO: 30770 - DNA, 260 bp, Unknown
  Description of Unknown: RightRegion for integrase B4771 sequence
cggaaccgtaacggtatgagcgtatatacttttactattgctataaatttggcagcttaattactatactaaaaggcaggattcgctcctgccttttctgtttcccttgttaattttttatcgctacatacaatgcacacccagcaataacgtaagctatattacgctgtcttttaatttgttttcgctttaggttgaactctttttctaactgagccaaggattgattcgcattctgcaataagctctcctgctctttc

SEQ ID NO: 30771 - DNA, 260 bp, Unknown
  Description of Unknown: RightRegion for integrase B4772 sequence
atctgcggatgctgcttttttccgaaattgcgcggcacaagcagccgctttcatatgtgaatatcactgccaccgggtaggaatgcaattcgcattcgtttgtacatcgttaggtctgagaagatgtgcatgcgaatgcttatttttttggaggttgtatgaaaaaaattgaagaactgcgccgctatttcaccaagggcgagcgagcgctgtggtttggttccgtatttgtgatcattgcggctttttattttttcgac

SEQ ID NO: 30772 - DNA, 260 bp, Unknown
  Description of Unknown: RightRegion for integrase B4773 sequence
gtaaatccgaactttataatcttcaatttgcttctaatccaaacaaaaaggcacagatagtccaattaagggccgtctgtgccttttctttttgtctactacgccagttctgttttgggacgttatggttatataccctctggcaaaaatcaagagcggaactgcccacaggcaatgccgctctctacaaaggccggggcctttcaattcaaaagaaaggtagcagacccgaaagcctgctacctcagaatcaggtctta

SEQ ID NO: 30773 - DNA, 260 bp, Unknown
  Description of Unknown: RightRegion for integrase B4774 sequence
attgtgttctacaaggatacaaatacccttgaattccactattacctcatggtagaatgaatcctgtaacccgcataaatgctggatttatagaatagtagctgtatttccggccatcccccaccgtgacccgcatccaacacgatcaatggcataaaaaactcccgcatatctttttgtttcatgatatgcgggagttttcccttttagatattcttttgtctactttaaaagtcctgccgtcactttctgcggaatca

SEQ ID NO: 30774 - DNA, 260 bp, Unknown; identical to SEQ ID NO: 30736
  Description of Unknown: RightRegion for integrase B4775 sequence

SEQ ID NO: 30775 - DNA, 77 bp, Unknown
  Description of Unknown: RightRegion for integrase B4776 sequence
agttgttcgactgggaatcatctggtccgagtggcgagaatcgaactcacggcctcttgaaccccattgtgcttctc

SEQ ID NO: 30776 - DNA, 260 bp, Unknown
  Description of Unknown: RightRegion for integrase B4777 sequence
gtgaccttactgaataggaatgagagcaacgtttgcaaagctctgttctacgtcatttaagcagagtttctgttgagtgaccattcagaaggcactttaatttttttgccttgaaatagtaaatatagggtgtttaaaactcccgtagcttatgaactgaaaaagttcgtgagttacgggagttttttgcgtatatcctcacttttaaagcaatgtgcattttgacgaaatttcgagatgaaaagtgtataatttaacaa

SEQ ID NO: 30777 - DNA, 260 bp, Unknown; identical to SEQ ID NO: 30764
  Description of Unknown: RightRegion for integrase B4778 sequence

SEQ ID NO: 30778 - DNA, 260 bp, Unknown
  Description of Unknown: RightRegion for integrase B4779 sequence
cgaaagcaaccgatttttttctttgcttcttgcagaaggacgagaataggacggcagtgaataccgtgccctttggcacggtagagccgtcctgaccgacgagcgtcgagcgaggagaaagagtccttctgcccctgccaaaaaggtcggttgcgaaagcaaccgattttttttgctctttgcagaaggacatttttccaattccagttttttcaaaatgcgcaactaaattcagttgcatttctatctttttgtgctat

SEQ ID NO: 30779 - DNA, 109 bp, Unknown
  Description of Unknown: RightRegion for integrase B4780 sequence
tttattgaaaagatcatttttaccgcaaaagacgatgtacagattaaatatactgtatgagcttctttttgctctatcaaaaaagcccgtttttgcgggcttttttaag

SEQ ID NO: 30780 - DNA, 260 bp, Unknown
  Description of Unknown: RightRegion for integrase B4781 sequence
atcgtgttctacaaggatacaaatacccttgaattccactattacctcatggtagaataaatcctgtaacccgcataaatactggggttatagaatagtagccgtatttccgaccatcccccaccatgccccgcatccaatacaatcaatgacataaaaaaactcccgcatatccttttgtttcatgatatgcgggagtttccccatttagatattttttgcttactttaaaattgctgccgtcacttcctgcggaatca

SEQ ID NO: 30781 - DNA, 260 bp, Unknown
  Description of Unknown: RightRegion for integrase B4782 sequence
tccgacgcccgaaatccccgctccgttctgccgtctgtacgacgagcagggcagcgatgaggaagactggttcgcggccgcaagcttctcgccccgttctgacaatgatggcagcaagcatcctgtgtttgtggacgacggtttcggaaagcctgtcccggcatccgatgtcatccagaaccgtgacggagagttttcttcccggtgctcgaccagcaaggaactgtttgacttcaatgtcgaggtcgctcagaatcgct

SEQ ID NO: 30782 - DNA, 260 bp, Unknown
  Description of Unknown: RightRegion for integrase B4783 sequence
ggtcatctgaatgagcctaactttgaattgaccataaagcccagaattccgcgcaaataaagggtttttcgttatttccaaaagaaacgggattattcttctgtaccaatatcagtcagtattcctgttacctctttatatggcatcgtatatcgctgtgaaagataacgcatagatgcagccaattcgccatccggtccaccgaactgacttataatgatcttcgccagtttcggattcgtctgggttatcttcacagg

SEQ ID NO: 30783 - DNA, 109 bp, Unknown; identical to SEQ ID NO: 30748
  Description of Unknown: RightRegion for integrase B4784 sequence

SEQ ID NO: 30784 - DNA, 260 bp, Unknown
  Description of Unknown: RightRegion for integrase B4785 sequence
atttgtgtggatcgggagaccaagaagggtttccgccaggaaaggagcataaaaaaatgaaacagatcaccatagatattgaaacggcatctgacgagaatatcaaagactgcggtgtataccgttatgcagagtcggagtgtttcgacttgctgctgatctcttacgctgtggacaatggtccggtagcaacctgtgacattgccaacggtgaaacattgccggacgatgttcggaatgcactcacagacaagactgtc

SEQ ID NO: 30785 - DNA, 76 bp, Unknown; identical to SEQ ID NO: 30753
  Description of Unknown: RightRegion for integrase B4786 sequence

SEQ ID NO: 30786 - DNA, 260 bp, Unknown
  Description of Unknown: RightRegion for integrase B4787 sequence
tttattgaacagattattttttatgatcgagacaatgtgcagatccgatataaaatgtgatatcggcaatgtgcagatccgatataaagccccagttttaggttattgcaaaggtgtttgattctgcgtcatgtgtagacagtttggattggaaggattacggcgtagattctattcttcataccgttttagatcataagcatctcggaaacggttccatcattctctgtcataacggtgctaaatatactgccgaggct

SEQ ID NO: 30787 - DNA, 260 bp, Unknown; identical to SEQ ID NO: 30686
  Description of Unknown: RightRegion for integrase B4788 sequence

SEQ ID NO: 30788 - DNA, 260 bp, Unknown
  Description of Unknown: RightRegion for integrase B4789 sequence
tcatgtagattgccacttatcttacaatttaaaatcccgcttatcaaaaaagcaatatgagtcacaaaattaaaaagagcgatatcattaccgctcttttttgcatgttactctttatctacgtcattttttctcacgacgtccatatcgagcgtgactgttccgattagatctttcgtcacgcaaaacttatgctttgataccatgcagcctttaaactcctcgtcgtaccacacgatctctatcgtatcgttagagat

SEQ ID NO: 30789 - DNA, 260 bp, Unknown
  Description of Unknown: RightRegion for integrase B4790 sequence
gcagaaaagggaaaagggttcgtatgctgcttgccatgctccacggatggtcaaggttgaaaagccttgaccttttcttttgcttacaaacatcccgcaaaagccgactggacggaggatttttcccctgcccggtcgggttctgtttgcgaatactgttggcgactgaaacgctgccgggacgcggacagcgattttttaccccgaaccagcattcacgcatcacaaacctattgaaagcgaacgaatgcggctgcaca

SEQ ID NO: 30790 - DNA, 109 bp, Unknown; identical to SEQ ID NO: 30759
  Description of Unknown: RightRegion for integrase B4791 sequence

SEQ ID NO: 30791 - DNA, 260 bp, Unknown
  Description of Unknown: RightRegion for integrase B4792 sequence
gaaagttcgtctgagatgcgtctggtccgagtggcgagaatcgaactcacggcctcttgaaccccattgtgcttctctcgaaaacacaatgtacaatccgatactgcctagactcagtattgttaaatctcaaatgtattataccattctgtttcattggatgtcaagacgtttcattccttttgtggtcaaattgtggtcaaacgaccccgacaaatgacttttctcccccagctaagttacatcgcgcaatttcgatt

SEQ ID NO: 30792 - DNA, 260 bp, Unknown
  Description of Unknown: RightRegion for integrase B4793 sequence
agttgttcgactgggaatcatctggtccgagtggcgagaatcgaactcacggcctcttgaaccccattgtgcttctatcgagaacacaatgtacgatctgatactatctggactcagtatcgttaaatttcaaatgcattataccattctgtttcattggatgtcaagacgtttcattccttttgtggtcaaattgtggtcaaacgacactgacaaatgacctttctcccccggctaagttacatcgcgcaatttcgatt

SEQ ID NO: 30793 - DNA, 109 bp, Unknown; identical to SEQ ID NO: 30751
  Description of Unknown: RightRegion for integrase B4794 sequence

SEQ ID NO: 30794 - DNA, 81 bp, Unknown
  Description of Unknown: RightRegion for integrase B4795 sequence
gcttcaagttcggatagcgtagagtatggtactcccgaccagagtcgaactggtgactaacccttaggaggggtttattat

SEQ ID NO: 30795 - DNA, 260 bp, Unknown
  Description of Unknown: RightRegion for integrase B4796 sequence
atcgtgttctataaggatacaaatacccttgaattccactattatctcatggtagactaatctctgtaagccgcgtaaatgctggctttacagaatagtagctgtatttccgaccatcccccaccatgccccgcatccaatacaatcaatgacataaaaaaactcccgcatatccttttgtttcatgatatgcgggagtttccccatttagatattttttgcttactttaaaattgctgccgtcacttcctgcggaatca

SEQ ID NO: 30796 - DNA, 260 bp, Unknown
  Description of Unknown: RightRegion for integrase B4797 sequence
attgtgttctacaaggatacaaatacccttgaatttcactattacctcatggtagaatgaatcctataacccgcataaacactggggttatagaatagtagctgtatttccggtcatcccccaccatgccccgcatccaatacgatcaatggcataaaaaagctcccgcatatccttttgtttcatgatatgcgggagtttccccatttagatattttttgcttactttaaaattgctgccgtcacttcctgcggaatta

SEQ ID NO: 30797 - DNA, 260 bp, Unknown
  Description of Unknown: RightRegion for integrase B4798 sequence
gagtgttcggataaagcttttctggtgcaccaaaaaaacaaaaagaagttgtcgcattaagctaaaatgcttaatgtgacaacttctttttattttacagtgaaaagtttgattttcttctttttaagaacgaacatcggcctgttccccctattttcacggcttccagaaaaatcgtgattcgcatgagcttcaacatgccctttatcaatatgatactggatcacgtccgccagcaaaactatgacatcgctatcgaa

SEQ ID NO: 30798 - DNA, 260 bp, Unknown; identical to SEQ ID NO: 30690
  Description of Unknown: RightRegion for integrase B4799 sequence

SEQ ID NO: 30799 - DNA, 75 bp, Unknown
  Description of Unknown: RightRegion for integrase B4800 sequence
agttgttcgactgggaatcatctggtccgagtggcgagaatcgaactcacggcctcttgaaccccattcaagcgc

SEQ ID NO: 30800 - DNA, 260 bp, Unknown
  Description of Unknown: RightRegion for integrase B4801 sequence
aagatcgtgttctataaagacacaaacacgctggaattccactattatctcatgatataataagtgctaaaacccgcataaatactgacgttgtgtaattgtagctgtatttcatatcacggtccaccatgccccgcatccaatacgatcaatgacataaaaaactcccacatatccttttgtttcatgatatgcgggagtttccccatttagatatttttgcttactttaaaattgctgccgtcacttcctgcggaatt

SEQ ID NO: 30801 - DNA, 260 bp, Unknown
  Description of Unknown: RightRegion for integrase B4802 sequence
tttttatataatcaaacaagacttgaacttgcggctcgtcaaaagaaaattcgtgtttgaataaattttcttataagtgattattctttgaaaatttatagtaaacacttcattcctttttccttttccccaacaagttttgcaacttgccggggaacccggattgcaaattcggcgacctaaggagtaacgaatttgggagaaacagttcagtgaactgtttcgtagaaggctagttcagttctgtgcacctcgaccaa

SEQ ID NO: 30802 - DNA, 109 bp, Unknown
  Description of Unknown: RightRegion for integrase B4803 sequence
atcgtgttctataaggatacaaatacccttgaattccactattatctcatggtagactaatctctgtaagccgcgtaaatgctggctttacagaatagtagctgtattt

SEQ ID NO: 30803 - DNA, 260 bp, Unknown
  Description of Unknown: RightRegion for integrase B4804 sequence
tttgcggcattagatgagtgttcgtctaagctctcgttagctccaccagcaggggcttgaccctgcacccgatccgctttactttatgtaaggcggttttttattgtcgctcatggatcattatttataaacccaactttgttatttcaccatggcagacgctgatataataaaaaagagtgcattaccacctcagtgaaatgcactctcatattttaccctatttctcctccagcccgctgagcgaaagcctgctctcc

SEQ ID NO: 30804 - DNA, 77 bp, Unknown; identical to SEQ ID NO: 30718
  Description of Unknown: RightRegion for integrase B4805 sequence

SEQ ID NO: 30805 - DNA, 260 bp, Unknown; identical to SEQ ID NO: 30686
  Description of Unknown: RightRegion for integrase B4806 sequence

SEQ ID NO: 30806 - DNA, 260 bp, Unknown; identical to SEQ ID NO: 30736
  Description of Unknown: RightRegion for integrase B4807 sequence

SEQ ID NO: 30807 - DNA, 260 bp, Unknown
  Description of Unknown: RightRegion for integrase B4808 sequence
ggtcatctgaatgagcctaactttgaattgaccataaagcccagaatcccgcgcaaataaagggttttttgttatttccaaaagaaacgggattattcttctgtaccaatatcagtcagtattcctgttacctctttatatggcatcgtatatcgctgtgaaagataacgcatagatgcagccaattcgccatccggtccaccgaactgactaataataattttcgccagtttcggattcgtctgggttatcttcacagg

SEQ ID NO: 30808 - DNA, 260 bp, Unknown
  Description of Unknown: RightRegion for integrase B4809 sequence
cgaaagcagccgatttttttattcgcttcttgcagaaggacgagaataggacggcagtgaataccgtgccctttggcacggtagagccgtcctgaccgacgagcgtcgagcgaggagaaagagtccttctgcccctgccaaaaaggtcggttgcataagcagccgattttttttgctctttgcagaaggacatttttccaattccagttttttcaaaatgcgcaactaaattcagttgcatttttatctttttgtgctat

SEQ ID NO: 30809 - DNA, 260 bp, Unknown
  Description of Unknown: RightRegion for integrase B4810 sequence
ataaaagacccgattacatatcccacaccggtaaataaagtaattgatcctgcagactgattaaatactgccgccaggccaccgccgtctgctgccgctgttaccatggaatatacccccaggatcacaatcagcggtacggaaatcgtacttacaatctccagcgctttcattcctgttgctgcggtaatggtcatcagaagacctgccacgatcgtcagaacccatttattgattcccagtaattctgcagttggaat

SEQ ID NO: 30810 - DNA, 260 bp, Unknown
  Description of Unknown: RightRegion for integrase B4811 sequence
cacgaactaaataacctcattttctttgacaaatacttctgtatccgcattgctgtatgatgatagcccgccgagcgcatgctcgacgggcttttctttttagccttctgggaaaagccgattggttagaaacaaatttatgatatatgttggcacaagatatcagttgtttgcgtcccggaaggctgttagattgtctgcggctttgctgaaagcagccgctggtggggactacagggtttgaacctgtacctagacgg

SEQ ID NO: 30811 - DNA, 260 bp, Unknown
  Description of Unknown: RightRegion for integrase B4812 sequence
cggaaccgtgacggtatgagcgtatatacttttactattgctataaatttagcagcttaattactatactaaaaggcaggattcgctcctgcctttttttatgttcgcaccaatatggcaattaaagttgttatgatatacccagttctttgcagcgcacgacgtttagatgtctttcgctctttcgcgattgactgcttcaacgtctcgtataattcgctggttctcttgagcgagctttctgctttcgctaatgagtt

SEQ ID NO: 30812 - DNA, 260 bp, Unknown
  Description of Unknown: RightRegion for integrase B4813 sequence
attgtgttctacaaggatacaaatacccttgaattccactattacctcatggtagaatgaatcctgtaacccgcataaacactggggttatagaatagtagctgtatttccgaccatcccccaccatgccccgcatccaatacgatcaatggcataaaaaagctcccgcatatccttttgtttcatgatatgcgggagcttccccatttagatatttattttaaaagtgctgccgtcacttcctgagggattacaaattc

SEQ ID NO: 30813 - DNA, 260 bp, Unknown
  Description of Unknown: RightRegion for integrase B4814 sequence
caaaagcagccgatttttttattcgcttcttgcagaaggacgagaataggacggcagtgaataccgtgccctttggcacggtagagccgtcctgaccgacgagcgtcgagcgaggagaaagagtccttctgcccctgccaaaaaggtcggttgcaaaagcagccgattttttttgctctttgcagaaggacatttttccaattccagttttttcaaaatgtgcaactaaattcagttgcatttttatctttttgtgctat

SEQ ID NO: 30814 - DNA, 109 bp, Unknown
  Description of Unknown: RightRegion for integrase B4815 sequence
gatggtggcaccgcagataatttcacgctctacctatacccgaaaatctcccataaataaaggcttttttgacggataacttttatgtacgcattcttccgttccgata

SEQ ID NO: 30815 - DNA, 260 bp, Unknown
  Description of Unknown: RightRegion for integrase B4816 sequence
gcgaaccttttcaaatatgtaaatcacagatatccacttcgactgatcatgcctctataatacacaagagcctaccattatggataggctcttattttataattcaaacgtgctgcgaactaattcagaaacactcatatctttgctctgtgcaacttccttcaatttggtatattccgcatcattgagagatatcactctctgctttctgcgattttccacacctactgtgataggcgctccggccccttcacgatttc

SEQ ID NO: 30816 - DNA, 260 bp, Unknown
  Description of Unknown: RightRegion for integrase B4817 sequence
tatttgcagattaaccgcaattggtttgcggtcataggcaacctgcaaaataccagatagacggcttgcgtatttgccctgtaacgcacgaaaacggggcaccccttatcagggtgccccgtttgaacgtcagattttgagccgttgacccggatagatgatattcgggttcgtgatgccgtttttggcggcaatcttctgataggtcgtgccgaacttagccgcaatgcctgaaagcgtgtcaccagatttgacggtgt

SEQ ID NO: 30817 - DNA, 260 bp, Unknown
  Description of Unknown: RightRegion for integrase B4818 sequence
cgttttgaagacgggaaggagttcggatgccgtgcgtctcgctccaccaacacaatataatccgaaccccttgccgattggccgtgggttcggatttattgttttgtccgccgtcccggcataattttccccgccgccgcataatagacaggggaggggaacgctatgaagcctgctgtttatctgtacggtgtgccgggtcaatatgaaaactatctggcggcactggagagcgccggggtccgggtgatcctgtgccg

SEQ ID NO: 30818 - DNA, 109 bp, Unknown
  Description of Unknown: RightRegion for integrase B4819 sequence
gatggcggcaccgcagataatttcacgctctacctatacccgaaaatctcccataaataaaggcttttttgacggataacttttatgtacgcattcttccgttccgata

SEQ ID NO: 30819 - DNA, 260 bp, Unknown
  Description of Unknown: RightRegion for integrase B4820 sequence
aaccaccgggataaaatattacttataggccaacaacttccaaatttgttaactttttaaaaatatcaatttattcacaaagttccaattcctgccttaatttatcgattcgcccgatccactcccaggtgttcggaaattccgaatagctggctttttcaagctccgccgccacagcagcgccagccacaggataagttggacaattttcataagacacctgcctgcatgagactaagcaactcagcacggccggcatt

SEQ ID NO: 30820 - DNA, 260 bp, Unknown
  Description of Unknown: RightRegion for integrase B4821 sequence
aaaaacatcacgtttaggctgataaatggcttggagcttggaggtgacttcgatggctaaaaatcgctatctgccctttggctatatgatacgcaacggcgagatcgtcattaatgagcaggaggccgcgctcgtccgtaccgcctttgaggaatatatgacaggcgcatcctacgccgctgttgcggaaacgctccaagccacgggcatacgttatcattcggatacgcctttgtggaacaagcacatggtcaagagga

SEQ ID NO: 30821 - DNA, 260 bp, Unknown
  Description of Unknown: RightRegion for integrase B4822 sequence
atgtgtgatgtcgcaacttttgaacttaccctatatccaaaaatccctatgaaatcctaactttttgtttgtttatattaccgataacatcatggtactaacgaacttgctcatatggaaatgatctgcgcaatcgtataccaactgacgaaagatctgactccggaacagatcaaagaatctggctttgacaaatattatgtcgaccatactctcgcactctggcctcagtctgccggaggaacaccttggactgcaac

SEQ ID NO: 30822 - DNA, 260 bp, Unknown
  Description of Unknown: RightRegion for integrase B4823 sequence
acgcacgaagaagcgaagagtcatgtaccgtttagaatgtcagtaaaattgaggatttaattttttaccaaaaatacatatatcatcatggtttatatgaaacaaaaccacgatgatatatatttatttacccccatttttaacacaaaaaatcccgcccggaattaaccggacgggttttctgcttacttttcctccttgacttttctaattgtgagcgtatcgtccaccatatccagctctatgctcctgtcctcggg

SEQ ID NO: 30823 - DNA, 260 bp, Unknown
  Description of Unknown: RightRegion for integrase B4824 sequence
atgtgtgatgtcgcaacttttgagcttaccctatatccaaaagtccctatgaaatcctaactttttgtttgtttatattaccgataacatcatggtactaacgagcttgctcatatggaaatgatctgcgcaatcgtataccaactgacgaaagatctgactccggaacagatcaaagaatctggctttgacaaatattatgtcgaccatactctcgcactctggcctcagtctgccggaggaacaccttggactgcaac

SEQ ID NO: 30824 - DNA, 260 bp, Unknown
  Description of Unknown: RightRegion for integrase B4825 sequence
acatctggtagcagtgcccccgcaaatttcgttttggatgttttcccgcgtctcaagtgagatgggggttatcatagtgtcgagtatggatattcgatacaaagatacccccacaccaaaagccctgccggatggcagggctttcctttattttttgacgatatcccgatagtagacttccgtcttgtcgtcccgtgcgtccttgtcgttcagccacgcttttgccagctcggcaaaaaagtcgggcgttttgacgccaa

SEQ ID NO: 30825 - DNA, 260 bp, Unknown; identical to SEQ ID NO: 30483
  Description of Unknown: RightRegion for integrase B4826 sequence

SEQ ID NO: 30826 - DNA, 260 bp, Unknown
  Description of Unknown: RightRegion for integrase B4827 sequence
atgtatgatgtcgcagcttttgagcttacactgtacccgaaaatcccttcgaaatcctagttttttgtttgtttatattactgataacatcacggtactgacgagcttgctcatatggaaatgatctgcgcaatcgtataccaactgacgaaagatctgactccggaacagatcaaagaatctggctttgacaaatattatgtcgaccatactctcgcactctggcctcagtctgccggaggaacaccttggactgcaac

SEQ ID NO: 30827 - DNA, 96 bp, Unknown
  Description of Unknown: RightRegion for integrase B4828 sequence
cgttttgaagacggggaggagttcggatgccgtgcgtctcgctccaccaacacaatataatccgaaccctttgccgattggccgtgggttcggatt

SEQ ID NO: 30828 - DNA, 260 bp, Unknown
  Description of Unknown: RightRegion for integrase B4829 sequence
atgtgtgatgttgcaacttttgagcttacactgtacccgaaaatcccttcgaaatcctagtttttgtttgtttatattgctgataacatcacggtactgacgaacttgctcatatggaaatgatctgcgcaatcatataccaactgacgaaagatctgactccggaacagatcaaagaatctggctttgacaaatattatgtcgaccatactctcgcactctggcctcagtctgccggaggaacaccttggactgcaact

SEQ ID NO: 30829 - DNA, 260 bp, Unknown
  Description of Unknown: RightRegion for integrase B4830 sequence
atgtatgatgtcgcaacttttgagcttacactgtacccgaaaatcccttcgaaatcctagttttttgtttgtttatattactgataacatcacggcactaacgaacttgctcatatggaaatgatctgcgcaatcgtataccaactgacgaaagatctgactccggaacagatcaaagaatctggctttgacaaatattatgttgaccatactctcgcactctggcctcagtctgccggaggaacaccttggactgcaac

SEQ ID NO: 30830 - DNA, 260 bp, Unknown
  Description of Unknown: RightRegion for integrase B4831 sequence
tctggtccactggaactaaacaaaataacgttgtgtttacttgaatttttattaatataatccgacgcaacgtgtgagcacctaccgacagtcaggctagtgatagtctggctgttttattttttatttaattattttatatatgtaggaggaattatttatgtttcaatatatctggccggttatattagttgtgttttcaaatactgtatatcaggtatgtacaaagggagttcctgaaaatatgaacccatttgctt

SEQ ID NO: 30831 - DNA, 260 bp, Unknown
  Description of Unknown: RightRegion for integrase B4832 sequence
ggattcaagctgaaatgcggactgactttgaaggaggaattatgtacggatacaaaatagaaaacgggacaatcgttgttgtagaagatgaggcggctatcatccgcagcattttcaagaattatctgtctggtatgagtatgcgaaaggcagcagatgcaactgaggttgattttccgcatagcaccgtgaaaaagatcatcaggcaaaaacggtatatcgggaacgaattctatcctgcgattatcgaaaaggatgta

SEQ ID NO: 30832 - DNA, 260 bp, Unknown
  Description of Unknown: RightRegion for integrase B4833 sequence
gatggaggcactgcagataatttcacgctttacctatacccgaaaatctcccataaataaaggcttttttgacggataacttttatgtacgcattcttccgttccgatatccgttaacatcgcacgtacactgtcatacggcatggcatagcgctgattcagataacgcattgaggcagccagttctccatccggaccgccaatctgcgaaattacgatttttgcgaaagcaggatccggttttctgatattcaccggaa

SEQ ID NO: 30833 - DNA, 260 bp, Unknown
  Description of Unknown: RightRegion for integrase B4834 sequence
gacaagctcagcatggtcgaaatcacggtccacccgtttgatgcatcattgagcaaatgatacatattgcgctcaatgatacaccaatgaaaaggcccggcaaaagccgggctcttattacttatactcctctaccatcgcgcggacccgcgcggtcttggcctgaagcatagccagatcatccgaccagctttccagcttgccgcgctcgcgctcggtggtagtctcggcggcctcgcacttggcgatcttatcagcca

SEQ ID NO: 30834 - DNA, 109 bp, Unknown
  Description of Unknown: RightRegion for integrase B4835 sequence
atgtgtgatgttgcaacttttgagcttacactgtacccgaaaatcccttcgaaatcctagtttttgtttgtttatattgctgataacatcacggtactgacgagcttgc

SEQ ID NO: 30835 - DNA, 77 bp, Unknown
  Description of Unknown: RightRegion for integrase B4836 sequence
aagttcgtacaccgtgcgtcatgctccaccagaaccaaaacactacacggaaacgtgtagtgtttttttcgttaagg

SEQ ID NO: 30836 - DNA, 260 bp, Unknown
  Description of Unknown: RightRegion for integrase B4837 sequence
gaaaaagagcaaagaaatgaccaatttactctaactttgtttccaaagctgcctaaatagacaaaccctatacttatgtatttttcaatatgtacccttgaagatagataaaccgttaagggtaattcattgccttctttatctactcctataggctcttgtaatgatacctctattttggattttttattagcccttatagtcatcaatatttcattggcaatagtatcactacggaaacatttaatcacaatcaaaat

SEQ ID NO: 30837 - DNA, 260 bp, Unknown
  Description of Unknown: RightRegion for integrase B4838 sequence
gatggcggcaccgcagataatttcacgctctacctatacccgaaaatctcccataaataaaggcttttttgacggataacttttatgtacgcattcttccgttccgatatccgttaacatcgcacgtacactgtcatacggcatggcatagcgctgattcagataacgcatagaggcagccagttccccatccggaccgccaatctgcgaaattacgatttttgcgaaagcaggatccggttttctgatattcaccggaa

SEQ ID NO: 30838 - DNA, 260 bp, Unknown
  Description of Unknown: RightRegion for integrase B4839 sequence
ctatcatctccaccacaaaggtacggtagcaatgatacaaattgctaccgtactttttaattattccatatgaaaatcccttgatataaagccaaaagcgaggttagtgggttcaaatgtgaacctgccgacctcgcttttttcgtttatggagtttctggcaaacgctacctcaggaaaaagtgaacccactctgccgaaccttttaatttttcatagaataattaaaaggtttaatccaccgtagcgttgtcctcaat

SEQ ID NO: 30839 - DNA, 109 bp, Unknown
  Description of Unknown: RightRegion for integrase B4840 sequence
atgtatgatgtcgcaacttttgagcttacactgtacccgaaaatcccttcgaaatcctagttttttgtttgtttatattactgataacatcacggcactaacgagcttg

SEQ ID NO: 30840 - DNA, 260 bp, Unknown
  Description of Unknown: RightRegion for integrase B4841 sequence
gggcataagctaccgcacgggcaacctgaatggagcttatacacaaaaacaaaaagataagcgggtgtaataatgaattgcattatatatgcaaaaaacgcaaacaacataaccgtttttgaacagcataatgtttgtgcagaaaaagccaaaagatacggctattccgttgcacatagaatttttgatataagaggggatagatttacagaagctataaacaaggtcattgcaaataatgatattgaaatcctgcttgt

SEQ ID NO: 30841 - DNA, 260 bp, Unknown
  Description of Unknown: RightRegion for integrase B4842 sequence
acgcacaaagaagcgaagagtcatgtaccgtttagaatgtcagtaaaattgaggatttaattttttaccaaaaatatatatatcatcatggtttatatgaagcaaaaccacgatgatatatatatttatttacccccatttttaacacaaaaaatcccgcccggaattaaccggacgggttttctgcttacttttcctccttgacttttctaattgtgagcgtatcgcccaccatatccagctctatgctcctgtcctcg

SEQ ID NO: 30842 - DNA, 260 bp, Unknown
  Description of Unknown: RightRegion for integrase B4843 sequence
gcgcccggctcttctggtggttcggatttaaaacgccccgctctgcgtctatgctgttgatataaacgcctgctgctttcaatacctcttttgtcttatcaagctgcgcctcaaaatcgcccttatggaaaagcgtaactctatacatttccctgcgctctttctcttcgtcgtctgcatttaccgcaggcgtacccagcagccgcagaaacgtataatatgcgtctggcttatcccgtccagtgtaaacgcctctctgg

SEQ ID NO: 30843 - DNA, 260 bp, Unknown
  Description of Unknown: RightRegion for integrase B4844 sequence
gaaggcgcggatttgtgttcagatttcgcgccgccttctccgccagaaaaagcaccttgaaacaggtgttttttcttttgcccttgacaagcagatgatgttatgatataatttgtaatacaagaagaaacaatttaatattcatgatttaacgttctgcaacggaggatacggtcatgacaccgaagttttattcaacctgtctcttgtccccgcattttctttcagtccgcttgattttactgatatatcgcgcataa

SEQ ID NO: 30844 - DNA, 260 bp, Unknown
  Description of Unknown: RightRegion for integrase B4845 sequence
acgaaccacttttatattgcacgatcaaggtacccgatacgattagttattacatattagatttattcttcatcaacacgatatgacattcttaaatgacttaacaattcatttacagtttcttcattaaatgttttaggctcaacaataggcccatcgccatattctgttatgtaaatatattgcattttatctgttggtttaaaatcagggtattcatcccttaaatcttcaaaatcatcactcaaccaatcttctaa

SEQ ID NO: 30845 - DNA, 109 bp, Unknown
  Description of Unknown: RightRegion for integrase B4846 sequence
gatggaggcactgcagataatttcacgctctacctatacccgaaaatctcccataaataaaggcttttttgacggacaacttttatgtacgcattcttccgttccgata

SEQ ID NO: 30846 - DNA, 260 bp, Unknown
  Description of Unknown: RightRegion for integrase B4847 sequence
aaaaggtcggttgcaaaagcagccgattttttttcgcttcttgcagaagggcgagaataggacggcagtgaataccgtgccctttggcacggtagagccgtcctgaccgacgagcgtcgagcgaggagaaagagtccttctgcccctgccaaaaaggtcggttgcaaaagcagccgatttttttctttgcttcttgcagaaggacatttttccaattccagttttttcaaaatgcgcaactaaattcagttgcatttcta

SEQ ID NO: 30847 - DNA, 260 bp, Unknown
  Description of Unknown: RightRegion for integrase B4848 sequence
atgtatgatgtcgcagcttttgagcttacactgtacccgaaaatcccttcgaaatcctagttttttgtttgtttatattactgataacatcacggtactgacgagcttgctcatatggagatgatctgcgcaatcatataccaactgacgaaagatctgactccggaacagatcaaagaatctggctttgacaaatattatgtcgaccatactctcgcactctggcctcagtctgccggaggaacaccttggactgcaac

SEQ ID NO: 30848 - DNA, 260 bp, Unknown
  Description of Unknown: RightRegion for integrase B4849 sequence
aaccaccgagataaaatattacttataggccaacaacttccatatttgttaactttttaaaaatatcaatttattcacaaagttccaattcctgccttaatttgtcgattcgcccgatccactcccaggtgttcggaaattccgaatagctggctttttcaagctccgccgccacagcagcgccagccacaggataagttggacaattttcataagacacctgcctgcatgagactaagcaactcagcacggccggcatt

SEQ ID NO: 30849 - DNA, 260 bp, Unknown
  Description of Unknown: RightRegion for integrase B4850 sequence
ggctgtgaatactcattgacccgaagcgtgggaagaaaattcctgcctatgccgcgataacctctactattctgacacccatgctgacacccatactctcatatatactccagggaaaacacgaacaagcattcatttaacatctataagagatagagccgaatacaaacgaaaatccctctcagaaagcattccaagagggattctgtatctctaccaacacataggtagagagcgtgatggtcgagatgaatcgtatc

SEQ ID NO: 30850 - DNA, 260 bp, Unknown
  Description of Unknown: RightRegion for integrase B4851 sequence
ccaaaaaaagccgcaatgttaattgcggctttttcctttatttgcctaagtataatctaagagattgacagggggaaggcctggcgtctataagattccgccttcttgaacacagcaaagcagtatttcatcacgctgttatcatggggcgttcccgaattggagaacatattaaatttcttcagtagctggcggaactcatggaaagtatattgactatcttgaattattgtagaagatcaaattatctcctgacattc

SEQ ID NO: 30851 - DNA, 260 bp, Unknown
  Description of Unknown: RightRegion for integrase B4852 sequence
atgtatgatgtcgcaacttttgagcttacactgtacccgaaaatcccttcgaaatcctagttttttgtttgtttatattactgataacatcacggcactaacgagcttgctcatatggaaatgatctgtgcaatcgtataccaactgacgaaagatctgactccggaacagatcaaagaatctggctttgacaaatattatgttgaccatactctcgcactctggcctcagtctgccggaggaacaccttggactgcaac

SEQ ID NO: 30852 - DNA, 260 bp, Unknown
  Description of Unknown: RightRegion for integrase B4853 sequence
attcgtcgcactgtaaagagatgcgtgttaaatgacaagaacctagaaatctctttctaggttctgcatatctttcttcttggtgtacccacctgccccatcatatcgtgccccagatggtttctccgataaccatagcttctggacaccccgaagtcgtcgtaatccgaatagggaaatgtcttcgcaattggacagtaagctttcagtccgtaatactttttccagacctttttatctgccccttccccagccggccg

SEQ ID NO: 30853 - DNA, 260 bp, Unknown
  Description of Unknown: RightRegion for integrase B4854 sequence
gatggaggcactgcagataatttcacgctttacctatacccgaaaatctcccataaataaaggctttttttgacggataacttttatgtacgcattcttccgttccgatatccgttaacatcgcacgtactctgtcatacggcatggcatagcgctgattcagataacgcatagaggcagccagttccccatccggaccgccaatctgcgaaattacgatttttgcgaaagcaggatccggttttctgatattcaccgga

SEQ ID NO: 30854 - DNA, 260 bp, Unknown
  Description of Unknown: RightRegion for integrase B4855 sequence
gcattccccaagttcgctttaagtagagatataagccgttacgatataaataaattatagcaaatattcacaaaataaaaagggcagggatttattcctgtcctcctttctctttttttaatatatccataacttctaaactatcttttagcatttgcaataattgttctttggttttaatcggtttagttattgtcgaatgaaaaatcattttatcatctttcacaatctcaaagttataaaacttctctccaaacata

SEQ ID NO: 30855 - DNA, 260 bp, Unknown
  Description of Unknown: RightRegion for integrase B4856 sequence
atgtgtgatgtcgcaacttttgaacttaccctatatccaaaaatccctatgaaatcctaactttttgtttgtttatattaccgataacatcatggtactaacgagcttgctcatatggaaatgatctgcgcaatcgtataccaactgacgaaagatctgactccggaacagatcaaagaatctggctttgacaaatattatgtcgaccatactctcgcactctggcctcagtctgccggaggaacaccttggactgcaac

SEQ ID NO: 30856 - DNA, 260 bp, Unknown
  Description of Unknown: RightRegion for integrase B4857 sequence
aatggggaaaccgacaaagataacatcatactgttccataacctcttgatctatatgtgaggaaagcggcgggcgagtaccattgtttagttcgtcctgcgctcggtcaaatacatcgtcctctgtatattccacttcggggataattctgaacagttcaccgcccgttttatcggaaatccagttcgcaacctgctgtgtattgcccgaccacgaaaaataggctaccaagatattagaatctcctgcggtactttctt

SEQ ID NO: 30857 - DNA, 260 bp, Unknown
  Description of Unknown: RightRegion for integrase B4858 sequence
gatggaggcactgcagataatttcacgctttacctatacccgaaaatctcccataaataaaggctttttttgacggataacttttatgtacgcattcttccgttccgatatccgttaacatcgcacgtacactgtcatacggcatggcatagcgctgattcagataacgcatagaggcagccagttccccatccggaccgccaatctgcgaaattacgatttttgcgaaagcaggatccggttttctgatattcaccgga

SEQ ID NO: 30858 - DNA, 109 bp, Unknown
  Description of Unknown: RightRegion for integrase B4859 sequence
atgtatgatgttgcaacttttgagcttacactgtacccgaaaatcccttcgaaatcctagtttttgtttgtttatattactgataacatcacggtactgacgagcttgc

SEQ ID NO: 30859 - DNA, 260 bp, Unknown
  Description of Unknown: RightRegion for integrase B4860 sequence
accgtagtcgtgttgtcaaccgcaatcgcaatgattgcccctttgcagaaggcttcctagctatttctttcggacgtattgcttcccctgccaagcaaggcagatccagccgctaggaatcattccccatggattgccggcagaatcgtactggatctgcatcaccgttaccgccgtccccgcattaagctgtccggcagagtttgagtgcttttgcccatcagcagttagctgcttctttgtttttcgggagtatcccg

SEQ ID NO: 30860 - DNA, 260 bp, Unknown
  Description of Unknown: RightRegion for integrase B4861 sequence
cgttttgaagacggggaggagttcggatgccgtgcgtctcgctccaccaaaacaatataatccgaaccttgtaccaattggtcatgggttcggatttattgttttaatggaagaaattgaagactggtaatggaaaagccgggaggactgccgattattgcaatcctcccggttcctttatgtagatgcactgtctgaaatctccttctttgctttccattcggcaaatgcctttttgccaccttcgctttcgtagtact

SEQ ID NO: 30861 - DNA, 260 bp, Unknown
  Description of Unknown: RightRegion for integrase B4862 sequence
gatggaggcaccgcagataatttcacgctttacctctacccgaaaatctcccataaataaaggctttttttgacggataacttttatgtacgcattcttccgttccgatatccgttaacatcgcacgtacactgtcatacggcatggcatagcgctgattcagataacgcatagaggcagccagttccccatccggaccgccaatctgcgaaattacgatttttgcgaaagcaggatccggttttctgatattcaccgga

SEQ ID NO: 30862 - DNA, 260 bp, Unknown
  Description of Unknown: RightRegion for integrase B4863 sequence
gggcataagctaccgcacgggcaacctgaatggagcttatacacaaaaacaaaaagataagcgggtgtaataatgaattgcattatatatgcaaaaaacgcaaacaacataaccgtttttgaacagcataatgtttgtgcagaaaaagccaaaagatacggttattccgttgcacatagaatttttgatataagaggggatagatttacagaagctataaacaaggtcattgcaaatgatgatattgaaatcctgcttat

SEQ ID NO: 30863 - DNA, 260 bp, Unknown
  Description of Unknown: RightRegion for integrase B4864 sequence
gggcataagctaccgcacgggcagcctgaatggagcttatacacaaaaacaaaaagataagcgggtgtaataatgaattgcattatatatgcaaaaaacgcaaacaacataaccgtttttgaacagcataatgtttgtgcagaaaaagccaaaagatacggttattccgttgcacatagaatttttgatataagaggggatagatttacagaagctataaacaaggtcattgcaaatgatgatattgaaatcctgctcgt

SEQ ID NO: 30864 - DNA, 260 bp, Unknown
  Description of Unknown: RightRegion for integrase B4865 sequence
atgtatgatgttgcaacttttgagcttacactgtacccgaaaatcccttcgaaatcctagtttttgtttgtttatattactgataacatcacggtactgacgaatgggtacataaaagttatcactcttataataggtaaatatagatgatacaatatattctttttcatcctcccctcattgtgaagggaggatatttttataccaatctaagttcgattgcttcaatttttttattcatcccgactgtgccaatcatg

SEQ ID NO: 30865 - DNA, 109 bp, Unknown
  Description of Unknown: RightRegion for integrase B4866 sequence
gatggtggcaccgcagataatttcacgctctacctatacccgaaaatctcccataaataaaggcttttttgacggataacttttatgtacgcattcctccgtaccaata

SEQ ID NO: 30866 - DNA, 260 bp, Unknown
  Description of Unknown: RightRegion for integrase B4867 sequence
ggctgtgaatactcattgacccgaagcatgggaagaaaattcctgcctatgccgcaataacctctactattctgacacccatactctcatatatactccagggaaaacacgaacaagcattcatttaacatctataagagatagagcaggatacaaacgaaaatccctctcggaaagcattccaagagggattctgtatctctaccaacacataggtagagagcgtgatggtcgagatgacaggattcgaacctgcgacc

SEQ ID NO: 30867 - DNA, 260 bp, Unknown
  Description of Unknown: RightRegion for integrase B4868 sequence
ccaaaatcgctggagttctgctccttgcaatcaatcacatatccaatgcgcttaaaatagctttgaatatttctccatgtagcaccaccgtttgcggacttgattcccataacattttcaaaaacaaacattttgggattatattttttgaggaaatccgcataaagcaaataaagactgtttcttggatcctgctccattggaatttccatatggcggctctgggcacgtccgactaaagagtatgcctgacaaggggg

SEQ ID NO: 30868 - DNA, 260 bp, Unknown
  Description of Unknown: RightRegion for integrase B4869 sequence
agcgacctccatctgacaatccaccccaaaattgctatacctcaaacctctaacatttaagttattgctgctgcgcgctgcatgaagtaccccgttcaatctgctcgtgcttcggcggtgacgatctcgtgctcagcaacgatggctatcagctgttcgtaaccctcggtcagttctcgatcatccggctcgagcgcgacatccagctgctcatgcccgcttacgacgtatgtctgccgcggcgcgactgctcgaacagc

SEQ ID NO: 30869 - DNA, 260 bp, Unknown
  Description of Unknown: RightRegion for integrase B4870 sequence
agcgacctccatctgacaatccaccccaaaattgctatacctcaaacctctaacatttaagttattgctgctgcgcgctgcatgaagtaccccgttcaatctgctcgtgcttcggcggtgacgatctcgtgctcagcaacgatggctatcagctgttcgtaaccctcggtcagttctcgatcatccggctcgagcgcgacattcagctgctcatgcccgcttacgacgtatgtctgccgcggcgcgactgctcgaacagc

SEQ ID NO: 30870 - DNA, 109 bp, Unknown
  Description of Unknown: RightRegion for integrase B4871 sequence
atccgctccatcgtaaagtcctgtgttttcgatggcgatcatctcgacgttactttttaacgtctttctacttttcgttctgattggggttccgacctgccccatcata

SEQ ID NO: 30871 - DNA, 260 bp, Unknown
  Description of Unknown: RightRegion for integrase B4872 sequence
tatttgcagattaaccgcaattggtttgcggtcataggcaacctgcaaaataccagataggcggcttgcgtatttgccctgtaacgcacgaaaacggggcaccccttatcagggtgccccgttttaacgtcagattttgagccgttgacccggatagatgatattcgggttcgtgatgccgtttttggcggcaatcttctgataagtcgtgccgaacttggccgcaatgcctgaaagcgtgtcaccagatttgacggtgt

SEQ ID NO: 30872 - DNA, 260 bp, Unknown
  Description of Unknown: RightRegion for integrase B4873 sequence
tcaagttcgactgagaagcgtctggtccgagtggcgagaatcgaactcacggcctcttgaaccccattgtgcttctctcgaaaacacaatgtacaatccgatactgcctagactcagtatcgttaaatttcaaatgcattataccattctgttttattggatgtcaagacgtttcattccttttgtggtcaaattgtggtcaagcaaccccgacaaatgacttttctcccccagctaagttacatcgcgcaatttcgatt

SEQ ID NO: 30873 - DNA, 260 bp, Unknown
  Description of Unknown: RightRegion for integrase B4874 sequence
gaaagttcgtctgggatgcgtctggtccgagtggcgagaatcgaactcacggcctcttgaaccccattgtgcttctctcaaaaacgcaatggacactccgataccacttgtacgcagtatcatcaaatttcaaaattattttatcattctgtttcgttagatgtcaagatgtttcgtttcttttgtggtcaaattgtggtcaaccgaccctgacaaatgaccattctcccctactaagttacatggcgcaattccgattt

SEQ ID NO: 30874 - DNA, 260 bp, Unknown; identical to SEQ ID NO: 30572
  Description of Unknown: RightRegion for integrase B4875 sequence

SEQ ID NO: 30875 - DNA, 171 bp, Unknown
  Description of Unknown: RightRegion for integrase B4876 sequence
ccgaacactttcttcttcgtgaagaacgtcttcgggtttgcgatagaggttacggtttaatccgtagcctcttttctatttcaggcaggaatcttcaagacctgaccgtcacgaatcatcgtacctgaaatgctgttgagagcggcgatctccgtccatctaccgcctctg

SEQ ID NO: 30876 - DNA, 260 bp, Unknown; identical to SEQ ID NO: 30555
  Description of Unknown: RightRegion for integrase B4877 sequence

SEQ ID NO: 30877 - DNA, 77 bp, Unknown
  Description of Unknown: RightRegion for integrase B4878 sequence
gaaagttcgtctgggatgcgtctggtccgagtggcgagaatcgaactcacggcctcttgaaccccattcaagcgcgc

SEQ ID NO: 30878 - DNA, 260 bp, Unknown
  Description of Unknown: RightRegion for integrase B4879 sequence
caatcgaacttcatcttctaccctgaagggttctcgtatatcgttcgtcgagtcgcttagtcgaattacacaatatctttccattgcttccctacttcttttctagcgacgggatttaaaatgaacccgtcttcgtttacctcgcaaccgatttcaaggacagtgccgtaaaatgcctgccgcatacttgcttcacgctttgcagcacgaaggcttgtagccttgagcttttccgtttgcctataactgccggcgttctg

SEQ ID NO: 30879 - DNA, 260 bp, Unknown
  Description of Unknown: RightRegion for integrase B4880 sequence
gaaagtgacctctccctcaccctccatcccgtggttttttctgcatccgctaaccgataacatcaatgtgcgggtgaacccgcccactaaagttatccataataaaagcgccgtcaaccgacggcgctttcgcattttcttatcagaatcccaatcctttcagcccgctaagccccttgagctgcttgagtccgctcgagccgcctcccgacttccccgagccgccgctcttcttgctcttgcttgccgccgtagacagc

SEQ ID NO: 30880 - DNA, 75 bp, Unknown
  Description of Unknown: RightRegion for integrase B4881 sequence
gaaagttcgtctgggatgcgtctggtccgagtggcgagaatcgaactcacggcctcttgaaccccattcaagcgc

SEQ ID NO: 30881 - DNA, 109 bp, Unknown; identical to SEQ ID NO: 30870
  Description of Unknown: RightRegion for integrase B4882 sequence

SEQ ID NO: 30882 - DNA, 109 bp, Unknown; identical to SEQ ID NO: 30870
  Description of Unknown: RightRegion for integrase B4883 sequence

SEQ ID NO: 30883 - DNA, 260 bp, Unknown
  Description of Unknown: RightRegion for integrase B4884 sequence
atccgttccatcgtaaaatcctgtgttttcgatggtgatcatcttgatgtgatgttttaacgcccatctacttttcattcagattggggttccgacctgccccatcatatcatgtcccagatgttgtctttgatatccatagcttcttgacaccccgaaatcatcataatcactgtactcaaacccttttgcgatcggtgaaaatgctttcagaccatacttttttacatatgacccatcttccttttcctggatctcat

SEQ ID NO: 30884 - DNA, 260 bp, Unknown
  Description of Unknown: RightRegion for integrase B4885 sequence
atccgctccatcgtaaagtcctgtgttttcgatggcgatcatctcgacgttactttttaacgtctttctacttttcgttctgattggggttccgacctgccccatcatatcatgtcccagatgttgtctttgatatccatagcttcttgacaccccgaaatcatcataatcactgtactcaaacccttttgcgatcggtgaaaatgctttcagaccatacttttttacatatgacccctcctccttttcctggatctcat

SEQ ID NO: 30885 - DNA, 260 bp, Unknown; identical to SEQ ID NO: 30871
  Description of Unknown: RightRegion for integrase B4886 sequence

SEQ ID NO: 30886 - DNA, 260 bp, Unknown
  Description of Unknown: RightRegion for integrase B4887 sequence
atccgctccatcgtaaagtcctgtgttttcgatggcgatcatctcgacgttactttttaacgtctttctacttttcgttctgattggggttccgacttgccccatcatatcatgtcccagatgctgtctctgatatccatagcttcttgacaccccgaaatcatcataatcactgtactcaaacccttttgcgatcggcgaaaatgctttcagaccatacttttttacatatgacccatcctccttttcctggatctcat

SEQ ID NO: 30887 - DNA, 160 bp, Unknown
  Description of Unknown: RightRegion for integrase B4888 sequence
tcaagtattatatggacaaaacaaggtgacaatattgatattaaagtaaattttctataggctcgtaacagccgaagattctgtgtttcgagtggagtaagttttaaacttgccattggtgccacgtgtagaactttccccatctgaagacacttgttac

SEQ ID NO: 30888 - DNA, 260 bp, Unknown; identical to SEQ ID NO: 30869
  Description of Unknown: RightRegion for integrase B4889 sequence

SEQ ID NO: 30889 - DNA, 260 bp, Unknown
  Description of Unknown: RightRegion for integrase B4890 sequence
tataacaattcattccggcagccgaatgttttcttttacgcgaaaataaacaggcaataaaaatgcgtgagcaaaggagaaaaaaccatgaattgtgtgatttacgcaaagaaaaatgatgatataagcgtgtacgaacaatacaatcaatgtgccacacttgcaaaacgatatggttattcaatcgtcggaaaagtccttgattttgacggaacgaaatttcatgaagcaataaataaagttatcgttgaacaagacgt

SEQ ID NO: 30890 - DNA, 260 bp, Unknown
  Description of Unknown: RightRegion for integrase B4891 sequence
gggcgcgaaatcaaagtctccaataactggttttgcataataacactgattcgtacatgaaaaccaaaaacagtcagcaaatgtgcttgttgtgtgtggtggtacccctataccttgtattatatagtggtacccctataataataagtgtcgaaaggcaataaggcttttcgaaagatagaaaggagcaaggcaatgagcatcacgttcaggatttggcgattcgcagtcaccgtccaaatccgcttccgccttcttaa

SEQ ID NO: 30891 - DNA, 260 bp, Unknown
  Description of Unknown: RightRegion for integrase B4892 sequence
atccgttccatcgtaaaatcctgtgttttcgatggtgatcatctcgatgtgatgttttaacgcccatctacttttcattcagattggggttccgacctgccccatcatatcatgtcccagatgctgtctctgatatccatagcttcttgacaccccgaaatcatcataatcactgtactcaaacccttttgcgatcggcgaaaatgctttcagaccatacttttttacatatgccccatcctccttttcctggatctcat

SEQ ID NO: 30892 - DNA, 99 bp, Unknown
  Description of Unknown: RightRegion for integrase B4893 sequence
gaaagttcgtctgggatgcgtctggtccgagtggcgagaatcgaactcacggcctcttgaaccccattcaagcgcgctaccaaaactgcgctacacccg

SEQ ID NO: 30893 - DNA, 260 bp, Unknown
  Description of Unknown: RightRegion for integrase B4894 sequence
atccgctccatcgtaaagtcctgtgttttcgatggcgatcatctcgacgttactttttaacgtctttctacttttcgttctgattggggttccgacctgccccatcatatcatgtcccagatgttgtctttgatatccatagcttcttgacaccccgaaatcatcataatcactgtactcaaatccttttgcgatcggtgaaaatgatttcagaccatacttttttacatatgacccatcctccttttcctggatctcat

SEQ ID NO: 30894 - DNA, 109 bp, Unknown
  Description of Unknown: RightRegion for integrase B4895 sequence
gaaagttctactgagatgcgtttggtccgagtggcgagaatcgaactcacggcctcttgaaccccattgtgcttctctcgaaaacacaatgtacaatccgatactgcct

SEQ ID NO: 30895 - DNA, 260 bp, Unknown; identical to SEQ ID NO: 30572
  Description of Unknown: RightRegion for integrase B4896 sequence

SEQ ID NO: 30896 - DNA, 260 bp, Unknown; identical to SEQ ID NO: 30893
  Description of Unknown: RightRegion for integrase B4897 sequence

SEQ ID NO: 30897 - DNA, 109 bp, Unknown; identical to SEQ ID NO: 30870
  Description of Unknown: RightRegion for integrase B4898 sequence

SEQ ID NO: 30898 - DNA, 260 bp, Unknown
  Description of Unknown: RightRegion for integrase B4899 sequence
gcaaatcagtcaaaatttgaaaacccaccatttaatgttgatattaagcttagactttaacttatatatacaacatcgatgtaccaattcataagcacattgatgttgtatattaaaacagcccccgaaggagctgttttttatttacacactatatattcataatatagtgatgttttatttttaactgcatctttatcatatatccaagcttctgtcatgtccgcccatgcgttcggtgtatcacctacaccgtattt

SEQ ID NO: 30899 - DNA, 109 bp, Unknown; identical to SEQ ID NO: 30870
  Description of Unknown: RightRegion for integrase B4900 sequence

SEQ ID NO: 30900 - DNA, 260 bp, Unknown
  Description of Unknown: RightRegion for integrase B4901 sequence
agcgacctccatctgacaatccaccccaaaatcgctatacctcaaacctctaacatttaagttattgctgctgcgctctgcacgaagtaccccgttcaatctgctcgtgcttcggcggtgacgatctcgtgctcagcaacgatggctatcagctgttcgtaaccctcggtcagttctcgatcatccggcttgagcgcgacatccagctgctcatgcccgcttacgacgtatgtctgccgcggcgcgactgctcgaacagc

SEQ ID NO: 30901 - DNA, 109 bp, Unknown; identical to SEQ ID NO: 30870
  Description of Unknown: RightRegion for integrase B4902 sequence

SEQ ID NO: 30902 - DNA, 260 bp, Unknown
  Description of Unknown: RightRegion for integrase B4903 sequence
ccggacaataaaaaaacagcggtcgaatgttcgaccgctgataaaaatggtggagcatagcggattcgaacctgtatgcgcttgtgaccggggaaggcaggctggaggactggaaagagagtccgcgcaagtcgctgtgttccggcttcaatgcggctgacccggatgccatcatcgcatggaatcgccgcatggcagaccttgtgatgatggatgaactggcaaaagcgatccgcggacaggtaccggcacagacgctt

SEQ ID NO: 30903 - DNA, 260 bp, Unknown
  Description of Unknown: RightRegion for integrase B4904 sequence
tcaagttcgactgagaagcgtctggtcagagtggcgagaatcgaactcacggcctcttgaaccccattgtgctccattcgcggacacattggtcaaaacggcacacaatatacgccatatcactaatttccgaatccgttttttcattctatttcatttgatgtcaagaagtttcgtttctattgtggtcaaattgtggtcaaacgaccccgacaaatgacctttcttccccagctaagttacatcgcgcaatttcgatt

SEQ ID NO: 30904 - DNA, 260 bp, Unknown
  Description of Unknown: RightRegion for integrase B4905 sequence
gaaagtgacctctccctcaccctccatcccgtggttttttcttcactcaccaaccgataacatcaatgcgtgggtgagcttgcgcacatggagatgatctccgccatcgtgtaccagctgacgcgcaatctcacacctgagcagattaaagaaggcggctttgacgcctactttgtcgatcacacgaccggcatttacccgcagtcggcctccggtgtgccgtggagcgccgcaacgttccagtccaaaggcgacccgat

SEQ ID NO: 30905 - DNA, 260 bp, Unknown
  Description of Unknown: RightRegion for integrase B4906 sequence
agcgacctccatctgacaatccaccccaaaattgctatacctcaaacctctaacatttaagttattgctgctgcgcgctgcatgaagtaccccattcaatctgctcgtgcttcggcggtgacgatctcgtgctcagcaacgatggctatcagctgttcgtaaccctcggtcagttctcgatcatccgacttgagcgcgacattcagctgctcatgcccgcttacgacgtatgtctgccgcggcgcgactgctcgaacagc

SEQ ID NO: 30906 - DNA, 109 bp, Unknown; identical to SEQ ID NO: 30870
  Description of Unknown: RightRegion for integrase B4907 sequence

SEQ ID NO: 30907 - DNA, 109 bp, Unknown; identical to SEQ ID NO: 30870
  Description of Unknown: RightRegion for integrase B4908 sequence

SEQ ID NO: 30908 - DNA, 260 bp, Unknown
  Description of Unknown: RightRegion for integrase B4909 sequence
gaaagtgacctctccctcaccctccatcccgtggttttttcttcactcaccaaccgataacatcaatgcgcgggtgagcttgcgcacatggagatgatctccgctatcgtgtaccagctgacgcgcaatctcacgcccgagcagatcaaggagggcggctttgacgcctactttgtcgatcacacgaccggcatttacccgcagtcggcctccggtgtgccgtggagcgccgcaacgttccagtccaaaggcgacccgat

SEQ ID NO: 30909 - DNA, 260 bp, Unknown
  Description of Unknown: RightRegion for integrase B4910 sequence
tccaccacaagtcaaaaaatccgaacattatcatcaatggtgatacgttcggatttttgatttttatgagttgttttataatttagaaattactgtggtttgtagcatattctcggcctcctccaagccttgcatcacttccgccatgatgcgagtggccaagataaatcctgaactgaacgcttcacactcagtgatgcaggacagttcacttgtgcagtccttgaatttttcaaaggtttctttttgtttcattgtca

SEQ ID NO: 30910 - DNA, 260 bp, Unknown
  Description of Unknown: RightRegion for integrase B4911 sequence
tcaagttcgactgagaagcgtctggtccgagtggcgagaatcgaactcacggcctcttgaaccccattgtgcttctctcgaaaacacaatgtacgatccgatactgcctagactcagtatcgttaaatttcaaatgtattatatcattctgtttcatttttcaacttgggtatactcctgttgtgtccgacatgaataaaatcgttcagaaaactgttgcatcgtctttccccacatggacgttagctgtatgagatatg

SEQ ID NO: 30911 - DNA, 260 bp, Unknown
  Description of Unknown: RightRegion for integrase B4912 sequence
agcgacctccatctgacaattcaccccaaaattgctatacctcaaacctctaacatttaagttattgctgctgcgcgctgcatgaagtaccccgttcaatctgctcgtgcttcggcggtgacgatctcgtgctcagcaacgatggctatcagctgttcgtaaccctcggtcagttctcgatcatccgacttgagcgcgacatccagctgctcatgcccgcttacgacgtatgtctgccgcggcgcgactgctcgaacagc

SEQ ID NO: 30912 - DNA, 260 bp, Unknown
  Description of Unknown: RightRegion for integrase B4913 sequence
tctgtgttcttcataaaacacacttttgggtttgtttacaggatagagaacgcacaataatcgtgcgttctttttctatgccacgggagggggtctaagtagtcaaagtagttgtttttaaggttttgcgtgtaacttcctctaagtacgcgcgtattaagcgaaagtttacgcaaaaaccgatttttaactacttagactacttaggcggggtaaacttagccctttttcagctcaaggacagcggactcaatcagctt

SEQ ID NO: 30913 - DNA, 98 bp, Unknown
  Description of Unknown: RightRegion for integrase B4914 sequence
gaaagttcgtctgggatgcgtctggtccgagtggcgagaatcgaactcacggcctcttgaaccccattcaagcgcgctaccaaaactgcgctacaccc

SEQ ID NO: 30914 - DNA, 260 bp, Unknown
  Description of Unknown: RightRegion for integrase B4915 sequence
tctgtgttcttcatcaaacacacctttggatttgtttataggatagagaacgctgattgaatcggcgttctttttctttgccacgggacgagatgaagtagttaaagtagttgtttttcggtttttgcgtaaactttcacctaatacgcgcgtacttagaggaagttacacgcaaaaacggattttccactactttaactacttgaacggggttaaatcagctctttttcagttcaaggacagcggactcaatcagcttg

SEQ ID NO: 30915 - DNA, 260 bp, Unknown
  Description of Unknown: RightRegion for integrase B4916 sequence
tccaccacaagtcaaaaaatccgaacattatcatcaatggtgatacgttcggatttttgatttttatgagttgttttataatttagaaattactgtggtttgtagcatattctcggcctcctccaagccttgcatcacttccgccatgatgcgagtggccaagataaatcctgaactgaacgcttcacactcagtgatgcaggacagttcacttgtgcagtccttgattttttcaaaggtttctttttgtttcattgtca

SEQ ID NO: 30916 - DNA, 240 bp, Unknown
  Description of Unknown: RightRegion for integrase B4917 sequence
ccaggtatgaagaatgcagatataccctatatcagctcccagatactttgcatcttttgacaattcattcaatgtggctgaagcagcatgatacagtgcatcatataacagcttctggttgctgtaaataatggaattcaattcctcaggaactgtgaatactacatgataatagggtgcatccaatacgttctctttttgtgcatcaatccatttctctttcggaaactcctggcacat

SEQ ID NO: 30917 - DNA, 109 bp, Unknown
  Description of Unknown: RightRegion for integrase B4918 sequence
gattatgtttcgtatgaacgaaacggtgaaaaattcaatattaaagtagaattctactaagtcaccgaaaatggtggctttttctttgttttttagtgaattgtcacgt

SEQ ID NO: 30918 - DNA, 260 bp, Unknown
  Description of Unknown: RightRegion for integrase B4919 sequence
agcgacctccatctgacaatccaccccagaattgctatacctcaaacctctaacatttaagttattgctgctgcgcgctgcatgaagtaccccgttcaatctgctcgtgcttcggcggtgacgatctcgtgctcagcaacgatggctatcagctgttcgtaaccctcggtcagttctcgattatccggctcgagcgcgacattcagctgctcatgcccgcttacgacgtatgtctgccgcggcgcgactgctcgaacagc

SEQ ID NO: 30919 - DNA, 260 bp, Unknown
  Description of Unknown: RightRegion for integrase B4920 sequence
gaaagttctactgagatgcgtctggtccgagtggcgagaatcgaactcacggcctcttgaaccccattgtgcttctctcgaaaacacaatgtacaatccgatactgcctagactcagtaccgttaaatttcaaatgtattatatcattctgtttcattggatgtcaagacgtttcattccttttgtggtcaaattgtggtcaaacgaacccgacaaatgacctttctcccccggctaagttacatcgcgcaatttcgatt

SEQ ID NO: 30920 - DNA, 260 bp, Unknown
  Description of Unknown: RightRegion for integrase B4921 sequence
tatttgcagattaaccgcaattggtttgcggttataggcaacctgcaaaataccagataggcggcttgcgtatttgccttgtaacgcacgaaaacggggcaccccttatcagggtgccccgcttgaacgtgtgttttagcgcctagcacttggcaaggtacttttccgacccattggacgtgccgacggcaacataacgcgtcgcgccgctgtatgcggtatagtgcgcccacgtgtagccgtccttttccacaacgtca

SEQ ID NO: 30921 - DNA, 76 bp, Unknown
  Description of Unknown: RightRegion for integrase B4922 sequence
gaaagttcgtctgggatgcgtctggtccgagtggcgagaatcgaactcacggcctcttgaaccccattgtgcttct

SEQ ID NO: 30922 - DNA, 75 bp, Unknown; identical to SEQ ID NO: 30880
  Description of Unknown: RightRegion for integrase B4923 sequence

SEQ ID NO: 30923 - DNA, 260 bp, Unknown
  Description of Unknown: RightRegion for integrase B4924 sequence
agcgacctccatctgacaatccaccccaaaattgctatacctcaaacctctaacatttaagttattgctgctgcgcgctgcatgaagtaccccgttcaatctgctcgtgcttcggcggtgacgatctcgtgctcagcaacgatggctatcagctgttcgtaaccctcggtcagttctcgatcatccgacttgagcgcgacatccagctgctcatgcccgcttacgacgtatgtctgccgcggcgcgactgctcgaacagc

SEQ ID NO: 30924 - DNA, 260 bp, Unknown; identical to SEQ ID NO: 30893
  Description of Unknown: RightRegion for integrase B4925 sequence

SEQ ID NO: 30925 - DNA, 260 bp, Unknown
  Description of Unknown: RightRegion for integrase B4926 sequence
cctggaatggggaaatacaaggctgaaagcgttggtgctggccaccagggaaatccgtgaggcgatggactggaccctgatcagcttgtccggattgaccacgctggaccagggcgtccagtttaaatttcctccattcccatctgtatacgccacatacgggtaattcttgagcttcgcaaaatcaaagggcgtttcccttaaaagcggatggtttctggaaagctgcacggaaaaagatacctccgccacatccctgt

SEQ ID NO: 30926 - DNA, 260 bp, Unknown
  Description of Unknown: RightRegion for integrase B4927 sequence
gttacccatgtgctgcatggtgcggcccacgcaggtcttcatggacctttgccggggtgagacggccatgcccaccgctgcgccgagcaccatgccggcgccgataccgcaccagaacgcggtattttccatttcactcacactccttttcgcacagcgacagtatgccccgtgcgcggcaaaaaagtcggaaagtgcattgctaaaatccgccattgccgttataatattcttaaaatcagacaaaaagcgaggaagtc

SEQ ID NO: 30927 - DNA, 260 bp, Unknown
  Description of Unknown: RightRegion for integrase B4928 sequence
atccgctccatcgtaaagtcctgtgttttcgatggcgatcatctcgacgttactttttaacgtctttctacttttcgttctgattggggttccgacctgccccatcatatcatgtcccagatgctgtctctgatatccatagcttcttgacaccccgaaatcatcataatcactgtactcaaacccttttgcgatcggtgaaaatgctttcagaccatacttttttacatatgacccatcctccttttcctggatctcat

SEQ ID NO: 30928 - DNA, 123 bp, Unknown
  Description of Unknown: RightRegion for integrase B4929 sequence
agcgacctccatctgacaatccaccccaaaattgctatacctcaaacctctaacatttaagttattgctggcaaggttattacgaagtttgcctgcacgctgttcctgccaacgccgctgcag

SEQ ID NO: 30929 - DNA, 260 bp, Unknown
  Description of Unknown: RightRegion for integrase B4930 sequence
tcaagttcgactgagaagcgtctggtccgagtggcgagaatcgaactcacggcctcttgaaccccattgtgcttctctcaaaaacgcaatggacactccgataccacttgtacgcagtatcatcaaatttcaaaattattttatcattctgtttcgttagatgtcaagatgtttcgtttcttttgtggtcaaattgtggtcaaccgaccctgacaaatgaccattctcccctactaagttacatggcgcaattccgattt

SEQ ID NO: 30930 - DNA, 109 bp, Unknown
  Description of Unknown: RightRegion for integrase B4931 sequence
agtagatggaatttggacaatacggataaattttctttagatattaagttgcgtgtataacttacaacataaatgttctaaagaaatggctcatgtagaaatactagga

SEQ ID NO: 30931 - DNA, 76 bp, Unknown
  Description of Unknown: RightRegion for integrase B4932 sequence
ggctgttcgactgagaagcaaatggtccgagtggcgagaatcgaactcacggcctcttgaaccccattcaagcgcg

SEQ ID NO: 30932 - DNA, 260 bp, Unknown
  Description of Unknown: RightRegion for integrase B4933 sequence
gaaagttctactgagatgcgtctggtccgagtggcgagaatcgaactcacggcctcttgaaccccattgtgcttctctcaaaaacgcaatggacactccgataccacttgtacgcagtatcatcaaatttcaaaattattttatcattctgtttcgttagatgtcaagatgttttgtttcttttgtggtcaaattgtggtcaaccgaccctgacaaatgaccattctcccctactaagttacatggcgcaattccgattt

SEQ ID NO: 30933 - DNA, 260 bp, Unknown
  Description of Unknown: RightRegion for integrase B4934 sequence
gatcagcatgagctggagtttcacttgattggcggattgaagttcaaagaaaatatataacagaaaatgccttgcagtaaaattgcagggcatttctttgttagttttggcactggatttccgcagaattttgtggtatccttgttggttgaaaggagtgatatcaatggcaagaaacagagtaatcttgttcggctactgcatgaaaaacggcgaaataacgaccgaaccaaaagaagtttacgcagttgaagaaattt

SEQ ID NO: 30934 - DNA, 260 bp, Unknown
  Description of Unknown: RightRegion for integrase B4935 sequence
tcattctttttcgtgaagcactgtgtcggatttgttttcatagtagaggacgtaggttaaactgcgtcctcttttttaggtgtctcgtaagtaagagcctgtttggaatctccaatgccagcagtggttgggtcagtcacgataccgagaatcgtgaggactgcgaacagggcatttacgactgccaacagcttgtttcccagctcacccaaattgagggtgtaaccgaagacagcggcaatcacctgtaccagcagaag

SEQ ID NO: 30935 - DNA, 260 bp, Unknown
  Description of Unknown: RightRegion for integrase B4936 sequence
atcggtgagaacatccgggaagttcttaaagactctcttacgggtcaccatatcatctgaacactttggatcaattggcgaaaagcccagttgtttcaaggtgttcaggcttttttacggtcggaaattttctaaaaactccatggatcaatggccgctttgcagaggttcaaacgggatttgaacctctgtttttccatattcaagcggattttcagtggcagcgccctttttcagagggctgcagcggctggatttca

SEQ ID NO: 30936 - DNA, 260 bp, Unknown
  Description of Unknown: RightRegion for integrase B4937 sequence
gatactcccccgttcgtgcacgacaacaaggtacacctagagatttttcttcgccaataacacctatgagaagggtaagcatccatgcaatcgttgatgacaggtgttagccgagaacgtgggccaccggaaagtcagcacaacagaaaaggggcctccgtatatctgggccgatgttgggagaccccaccccgaaacgaggcgaaaggattataccatggacgaggaaaacgagtacacgctaacccgctactacacca

SEQ ID NO: 30937 - DNA, 260 bp, Unknown; identical to SEQ ID NO: 30873
  Description of Unknown: RightRegion for integrase B4938 sequence

SEQ ID NO: 30938 - DNA, 76 bp, Unknown
  Description of Unknown: RightRegion for integrase B4939 sequence
tcaagttcgactgagaagcgtctggtccgagtggcgagaatcgaactcacggcctcttgaaccccattgtgcttct

SEQ ID NO: 30939 - DNA, 260 bp, Unknown
  Description of Unknown: RightRegion for integrase B4940 sequence
agcgacctccatctgacaatccaccccaaaattgctatacctcaaacctctaacatttaagttattgctgtcaaaacataaaatgttataggtgtacgaaacgacaaaaaaagcgccgtcaatcgacggcgctttcgcatttccttatcagaatcccaatcctttcaaaccactaagtcccttaagctgcttcaaaccgccggaactgcttccgccactcgacctactcgacccgccggaactctttttgctcttgcttg

SEQ ID NO: 30940 - DNA, 260 bp, Unknown
  Description of Unknown: RightRegion for integrase B4941 sequence
tatctgcaaataaaccgcaactggtttgccgttataggtaacctacaaaataccagataggcggcttgcgtatttgccctgtaacgcacgaaaacggggcaccccttatcagggtgccccgtttgaacgttagattttgagccgttgacccggataaatgatattcgggttcgtgatgccgtttttggcagcaatcttctgataggtcgtgccgaacttggccgcaatgcctgaaagcgtgtcaccagatttaacggtgt

SEQ ID NO: 30941 - DNA, 76 bp, Unknown; identical to SEQ ID NO: 30921
  Description of Unknown: RightRegion for integrase B4942 sequence

SEQ ID NO: 30942 - DNA, 70 bp, Unknown
  Description of Unknown: RightRegion for integrase B4943 sequence
agcgacctccatctgacaatccaccccaaaattgctatacctcaaacctctaacatttaagttatcgctg

SEQ ID NO: 30943 - DNA, 260 bp, Unknown
  Description of Unknown: RightRegion for integrase B4944 sequence
agcgacctccatctgacaatccaccccaaaattgctatacctcaaacctctaacatttaagttattgctgctgtgctctgcacgaagtaccccgttcaatctgctcgtgcttcggcggtgacgatctcgtgctcagcaacgatggctatcagctgttcgtaaccctcggtcagttctcgattatccggctcgagcgcgacatccagctgctcatgcccgcttacgatgtatgtctgccgcgacgcgactgctcgaacagc

SEQ ID NO: 30944 - DNA, 109 bp, Unknown
  Description of Unknown: RightRegion for integrase B4945 sequence
atccgctccatcgtaaagtcctgtgttttcgatggcgatcatctcgacgttactttttaacatctttctacttttcgttctgattggggttccgacctgccccatcata

SEQ ID NO: 30945 - DNA, 109 bp, Unknown; identical to SEQ ID NO: 30870
  Description of Unknown: RightRegion for integrase B4946 sequence

SEQ ID NO: 30946 - DNA, 109 bp, Unknown; identical to SEQ ID NO: 30870
  Description of Unknown: RightRegion for integrase B4947 sequence

SEQ ID NO: 30947 - DNA, 260 bp, Unknown
  Description of Unknown: RightRegion for integrase B4948 sequence
tataatgaatcattacggcaaccgaatgttttcttttacgcgaaaataaacaggcaataaaaatgtgtgataaaaggagaaatagaccatgagttgtgtgatttacgcaaaacaaaatgatgatataagtgtgtacgaacaatataatcaatgtgccacacttgccaaacgatacggctattcaatagaaagcagggtgcttgactttgacggtactaactttcataaagccgtaaacagagtgattgcggaatgcgacg

SEQ ID NO: 30948 - DNA, 260 bp, Unknown
  Description of Unknown: RightRegion for integrase B4949 sequence
agcgacctccatctgacaatccaccccaaaattgctatacctcaaacctctaacatttaagttattgctgctgcgcgctgcatgaagtaccccgttcaatctgctcgtgcttcggcggtgacgacctcgtgctcagcaacgatggctatcagctgttcgtaaccctcggtcagttctcgatcatccgacttgagcgcgacattcagctgctcatgcccgcttacgacgtatgtctgccgcggcgtgactgctcgaacagc

SEQ ID NO: 30949 - DNA, 260 bp, Unknown; identical to SEQ ID NO: 30905
  Description of Unknown: RightRegion for integrase B4950 sequence

SEQ ID NO: 30950 - DNA, 76 bp, Unknown
  Description of Unknown: RightRegion for integrase B4951 sequence
ggctgttcgactgagaagcaaatggtccgagtggcgagaatcgaactcacggcctcttgaaccccattgtgcttct

SEQ ID NO: 30951 - DNA, 260 bp, Unknown
  Description of Unknown: RightRegion for integrase B4952 sequence
agatgggctccgaaaaacaactttacccttgacctgttcccgctctaccaaaaagaatagacagaacttgcgcaaaaagaaaagaggatggaactttccgtcctcttttcttcattgacatctttgtggttcgtacaaattagcgccataaagatataccttatttttttgccatttccagcagcgccttgaccttggctacgcgctcgatgtagttgtcgtgctcccagtcccaaacggcctgcatactcaccggggcg

SEQ ID NO: 30952 - DNA, 260 bp, Unknown
  Description of Unknown: RightRegion for integrase B4953 sequence
tatttgcagattaaccgcaattggtttgcggtcataggcaacctgcaaaataccagatagacggcttgcgtatttaccctgtaacgcacgaaaacggggcaccccttatcagggtgccccgtttgaacgtcagattttgagccgttgacccggatagatgatattcgggttcgtgatgccgtttttggcggcaatcttctgataggtcgtgccgaacttagccgcaatgcctgaaagcgtgtcaccagatttgacggtgt

SEQ ID NO: 30953 - DNA, 260 bp, Unknown
  Description of Unknown: RightRegion for integrase B4954 sequence
gatcaacatgagttggagtttcatttgatcggcggattaaaattcaaagaaaatgtataaagcacattgacaatttagcataattatgataaaatatattcaggaggcgatgattatggatatgaatatgataagacccgtttcggatctaagaaacaattttgcggatatttcaaaaaccgtgcatgaaactgaacaacccgtcttcctcactaaaaacggatatggcgatatggtcgttatgagtatggaggcttttg

SEQ ID NO: 30954 - DNA, 260 bp, Unknown
  Description of Unknown: RightRegion for integrase B4955 sequence
tcaagtattatatggacaaaacaaggtgacaatattgatattaaagtaaattttctataggctcgtaacagccgaagattctgtgtttcgagtggagcaagttttaaacttgccattggtgccacgtgtagaactttctccatctgaagacacttgttacgagcataaaaaataagggactatcaaaagatagtcccttaaatatttggaagtataaaatgtggtgattgagatatggtatttatattattgccgttatc

SEQ ID NO: 30955 - DNA, 260 bp, Unknown
  Description of Unknown: RightRegion for integrase B4956 sequence
ggctgttcgactgagaagcaaatggtccgagtggcgagaatcgaactcacggcctcttgaaccccattgtgcttctctcgaaaacacaatgtacaatccgatactgcctagactcagtatcgttaaatttcaaatgcattataccattctgtttcattggatgtcaagacgtttcattccttttgtggtcaaattgtggtcaaacgaccccgacaaatgacctttctcccccagctaagttacatcgcgcaatttcgatt

SEQ ID NO: 30956 - DNA, 109 bp, Unknown; identical to SEQ ID NO: 30870
  Description of Unknown: RightRegion for integrase B4957 sequence

SEQ ID NO: 30957 - DNA, 75 bp, Unknown
  Description of Unknown: RightRegion for integrase B4958 sequence
ggctgttcgactgagaagcaaatggtccgagtggcgagaatcgaactcacggcctcttgaaccccattcaagcgc

SEQ ID NO: 30958 - DNA, 260 bp, Unknown
  Description of Unknown: RightRegion for integrase B4959 sequence
agcatacaaaccgtttcgataatatgcggttgtatggcagttacaaagcgtcgggaataacttctcgacgcttttcttttgccacgaacaaaaaatctcccgccctcaaacgagagcgggagaaaattttatcagaacctgttcagtcccttgcgaccgataaccgcagggaaatcacgatagcagcagtccatgtcaacattacccttgatgccataaaccttgcccttccagctgtactgccagatgccaacatcgtc

SEQ ID NO: 30959 - DNA, 260 bp, Unknown; identical to SEQ ID NO: 30884
  Description of Unknown: RightRegion for integrase B4960 sequence

SEQ ID NO: 30960 - DNA, 76 bp, Unknown
  Description of Unknown: RightRegion for integrase B4961 sequence
gaaagttcgtctgggatgcgtctggtccgagtggcgagaatcgaactcacggcctcttgaaccccattcaagcgcg

SEQ ID NO: 30961 - DNA, 260 bp, Unknown
  Description of Unknown: RightRegion for integrase B4962 sequence
agcgacctccatctgacaatccaccccaaaattgctatacctcaaacctctaacatttaagttattgctgctgcgcgctgcatgaagtaccccgttcaatctgctcgtgcttcggcggtgacgatctcgtgctcagcaacgatggctatcagctgttcgtaaccctcggtcagttctcgatcatccggctcgagcgcgacattcagctgctcatgcccgcttacgatgtatgtctgccgcggcgcgactgctcgaacagc

SEQ ID NO: 30962 - DNA, 260 bp, Unknown
  Description of Unknown: RightRegion for integrase B4963 sequence
atcggtgagaacatccgggaagttcttaaagactctcttacgggtcaccaagtaagctgaacactatggatcaattggcgaaaaagccagttgttccatagtgttttcagcttttcgaggccgaaaattttctgaaaactccatggctcaataaacgcattccagaggttcaaacaggatttgaacctctgtttttccatatccaaggggaattttatgagcagcgccctttttcggcggctggtcaagagctgaaatca

SEQ ID NO: 30963 - DNA, 73 bp, Unknown
  Description of Unknown: RightRegion for integrase B4964 sequence
tcaagttcgactgagaagcgtctggtccgagtggcgagaatcgaactcacggcctcttgaaccccattgtgct

SEQ ID NO: 30964 - DNA, 77 bp, Unknown
  Description of Unknown: RightRegion for integrase B4965 sequence
ggctgttcgactgagaagcaaatggtccgagtggcgagaatcgaactcacggcctcttgaaccccattgtgcttctc

SEQ ID NO: 30965 - DNA, 260 bp, Unknown
  Description of Unknown: RightRegion for integrase B4966 sequence
ctttcggatgtgtcaaaaagttcgcctatactctccaacggtcaaccaaaaaccacctgatgaagatcaggtggtttttttgttctcataagaaaaaccacaagctatgcttgtggaagaatagagccgtagcgttgaaacggtagaaaaagaacctccttttgctataattagaagcgggtaacgccaaccgcatactaaagcaaaaggaggttcatccatatggacgagaaaagtttatcacatacgagctggaattg

SEQ ID NO: 30966 - DNA, 260 bp, Unknown; identical to SEQ ID NO: 30929
  Description of Unknown: RightRegion for integrase B4967 sequence

SEQ ID NO: 30967 - DNA, 260 bp, Unknown
  Description of Unknown: RightRegion for integrase B4968 sequence
agcgacctccatctgacaatccaccccaaaattgctatacctcaaacctctaacatttaagttattgctgctgcgctctgcacgaagtaccccgttcaatctactcgtgcttcggcggtgacgatctcgtgctcagcaacgatggctatcagctgttcgtaacccttggtcagttctcgattatccggcttgagcgcgacatccagctgctcatgcccgcttacgacgtatgtctgccgcggcgcgactgctcgaacagc

SEQ ID NO: 30968 - DNA, 260 bp, Unknown
  Description of Unknown: RightRegion for integrase B4969 sequence
gccgctgaggcgggtgaggtgttcggatgctacgcctcatgctccaccaatgcaagataatccgaaccttagaccaatcggtcatgggttcggatttcttgtttttatcaaggacattgaagtttagtttcgggatagaataacatcaaattcaggaggatatacccatggagaagctcgtaaactgtgcgttcaatatagataccgcctgcgtggaacttcacttcacggatgggagcatttgctccatcgactgcacc

SEQ ID NO: 30969 - DNA, 260 bp, Unknown; identical to SEQ ID NO: 30923
  Description of Unknown: RightRegion for integrase B4970 sequence

SEQ ID NO: 30970 - DNA, 260 bp, Unknown
  Description of Unknown: RightRegion for integrase B4971 sequence
tcaagtattatatggacaaaacaaggtgacaatattgatattaaagtaaattttctataggctcgtaacagccgaagattctgtgtttcgagtggagcaagttttaaacttgccattggtgccacgtgtagaactttccccatctgaagacacttgttacgagcataaaaaataagggactatcaaaagatagtcccttaaatatttggaagtacaaaatgtggtgattgagatatggtatttatattattgccgttatc

SEQ ID NO: 30971 - DNA, 109 bp, Unknown
  Description of Unknown: RightRegion for integrase B4972 sequence
atccgctccatcgtaaagtcctgtgttttcgatggcgatcatctcgacgttactttttaacgtctttctacttttcgttctgattggagttccgacctgccccatcata

SEQ ID NO: 30972 - DNA, 260 bp, Unknown
  Description of Unknown: RightRegion for integrase B4973 sequence
gaacgagacctctccctcaccctccatcccgtggttttttcttcatccactaaccgataacatcaatgcgcgggtgagcttgcgcacatggagatgatctccgccatcgtgtaccagctgacgcgcaatctcacgcccgagcagatcaaggagggcggctttgacgcctactttgtcgatcacacgaccggcatttacccgcagtcagcctccggtgtgccgtggagcgccgcaacgttccagtccaaaggcgacccgat

SEQ ID NO: 30973 - DNA, 260 bp, Unknown
  Description of Unknown: RightRegion for integrase B4974 sequence
agcgacctccatctgacaatccaccccaaaattgctatacctcaaacctctaacatttaagttattgctgctgcgcgctgcatgaagtaccccgttcaatctgctcgtgcttcggcggtgacgatctcgtgctcagcaacgatggctatcagctgttcgtaaccctcggtcagttctcgattatccggctcgagcgcgacattcagctgctcatgcccgcttacgacgtatgtctgccgcggcgcgactgctcgaacagc

SEQ ID NO: 30974 - DNA, 260 bp, Unknown; identical to SEQ ID NO: 30572
  Description of Unknown: RightRegion for integrase B4975 sequence

SEQ ID NO: 30975 - DNA, 260 bp, Unknown
  Description of Unknown: RightRegion for integrase B4976 sequence
agcgacctccatctgacaatccaccccaaaattgctatacctcaaacctctaacatttaagttattgctgtcaaagcataaaatgttataggtttacgaaacgacaaaaaagcgccgtcaatcgacggcgctttcgcatttccttatcagaatcccaatcctttcaaaccactaagtcccttaagctgcttcaaaccgccggaactgcttccgccactcgacctactcgacccgccggaactctttttgctcttgcttgc

SEQ ID NO: 30976 - DNA, 260 bp, Unknown
  Description of Unknown: RightRegion for integrase B4977 sequence
tcaagtattatatggacaaaacaaggtgacaatattgatattaaagtaaattttctataggctcgtaacagccgaagattctgtgtttcgagtggagcaagttttaaacttgccattggtgccacgtgtagaactttctccatctgaagacacttgttacgagcataaaaaataagggactatcaaaagatagtcccttaaatatttggaagtacaaaatgtggtgattgagatatggtatttatattattgccgttatc

SEQ ID NO: 30977 - DNA, 77 bp, Unknown
  Description of Unknown: RightRegion for integrase B4978 sequence
tcaagttcgactgagaagcgtctggtccgagtggcgagaatcgaactcacggcctcttgaaccccattcaagcgcgc

SEQ ID NO: 30978 - DNA, 260 bp, Unknown; identical to SEQ ID NO: 30909
  Description of Unknown: RightRegion for integrase B4979 sequence

SEQ ID NO: 30979 - DNA, 260 bp, Unknown
  Description of Unknown: RightRegion for integrase B4980 sequence
tttgactggagcgaggaaggagtgctaataactccgggtactacctctggcgtaccatgacgagtgttcttataggatttgatcctttgagaacactcgtcatttttattgcccattttgcgccggttcgtaactgacatagacacctctgcgggtgttgacggttacatcgggcacgggcatggacggggtatccgggataaacagggcaccgacacagttgtagtagatggtcaatttctggacccattcgccgttga

SEQ ID NO: 30980 - DNA, 260 bp, Unknown
  Description of Unknown: RightRegion for integrase B4981 sequence
aaggcagaccgcggcgaagggttcgtatgctgcgcgtcttgccctgttcttagaccttgaagcaagatagttgtttcaaggttttttttgtttaaaaatgaaaatagatgtattataatgggcataaagtatttattttaaatgatattaattttgtatttcaaaatggattacaaatgtaaggaggattttgaaatgaaggaaaagcttaagattaatgtgacgaagccacaatatgtgcaggtatctgatattacata

SEQ ID NO: 30981 - DNA, 260 bp, Unknown
  Description of Unknown: RightRegion for integrase B4982 sequence
aagcaggacgaaatgaccgtcactttccttggcggcctgaaattcactgagctgatataggagcaagccatgaagaagacacgctttataccatacggatacaccatgcgaaacggacgaaccgtcattgagcacggcgaagctgacattatccgatatatcttcgacgagtacatcaaaggagcctctctcaaagatctggccgaagaactgacagctcgcaaagtgccttatacggagaagacggaagtatgggataa

SEQ ID NO: 30982 - DNA, 260 bp, Unknown
  Description of Unknown: RightRegion for integrase B4983 sequence
gcgcccggctcttctggtggttcggatttaaaacgccccgctctgcatctatgctgttgatataaacgcctgctgctttcaatacctcttttgtcttatcaagctgcgcctcaaaatcgcccttattgaaaagcgtaactctatacatttccctgcgctctttctcttcgtcgtctgcatttaccgcaggcgtacccagcagccgcaaaaatgtatagtatgcgtccggcttatcccgtccagtgtatacgcccctctgg

SEQ ID NO: 30983 - DNA, 260 bp, Unknown
  Description of Unknown: RightRegion for integrase B4984 sequence
gcgcccggctcttctggtggttcggatttaaaacgccccgctctgcgtctatgctgttgatataaacgcctgctgctttcaatacctcttttgtcttatcaagctgcgcctcaaaatcgcccttatggaaaagcgtaactctatacatttccctgcgctctttctcttcgtcgtctgcatttaccgcaggcgtacccagcagccgcagaaacgtataatatgcgtctggcttatcccgcccagtgtaaacgcctctctgg

SEQ ID NO: 30984 - DNA, 75 bp, Unknown; identical to SEQ ID NO: 30957
  Description of Unknown: RightRegion for integrase B4985 sequence

SEQ ID NO: 30985 - DNA, 260 bp, Unknown
  Description of Unknown: RightRegion for integrase B4986 sequence
aacaccctattctttatagggacactgttcggacaaacaacaaaacaccgagtagagtaataagctctgcccggtgttttgttgttggtgggtagaacgggtagagaaaaatcgcaatttcccataaactctcttatagtagctttcttatagactactttatgaaaaacatagatttactctacccactctacccgtaaggaggaatatatactcaacagcctgtcggctgaatgagccgtttaggactttttcagttc

SEQ ID NO: 30986 - DNA, 260 bp, Unknown
  Description of Unknown: RightRegion for integrase B4987 sequence
agcagaacggaaataggattcgacatgaaattcggacccgtcttccgggaaaggatttgattatgaaacacacaccatacggatacgacattgtgggcggtgcggcagtcatcaacgaagaacaggctgccaacttgcgaaagctgtgtgagaactacctttccggcatgtcttttgtacaggcggcaaaggatgccgggttggagatgaagcacagcggtgttaagagactgatgcagaacccacgctaccttggagac

SEQ ID NO: 30987 - DNA, 260 bp, Unknown
  Description of Unknown: RightRegion for integrase B4988 sequence
gttgattttggtaggaacaagggtggagaagtccacctggacgtctacctgaaagaatagaaaaaggcccccggcaactgccaggggccttgcttataggtcaatgtccaactcaaccgggcaatggtcgctgcccataatgtcactatgtattttcgcgtctacgatcttatccttggcgcagtcatcgaccaggaaatagtcaatccgccaccccgcatttttctccctggcatggaaacggtagctccaccaggaat

SEQ ID NO: 30988 - DNA, 75 bp, Unknown; identical to SEQ ID NO: 30957
  Description of Unknown: RightRegion for integrase B4989 sequence

SEQ ID NO: 30989 - DNA, 260 bp, Unknown; identical to SEQ ID NO: 30986
  Description of Unknown: RightRegion for integrase B4990 sequence

SEQ ID NO: 30990 - DNA, 260 bp, Unknown
  Description of Unknown: RightRegion for integrase B4991 sequence
acggtgagcggcagaggggagggctataaggcggctttcggagaaattttcagacggtagggatcatttcggggaggagggtggtacggaagaattagtaccaccatgatgtcaatgactaactaatatgtggcagaaatttcgcatatttttatgatttcggcagtttcggatatatagttatctcaaaatcatcgggtgaaccgctccagcgggtgttctgcgtttttttgtaaacgactttttcaagcacttcttta

SEQ ID NO: 30991 - DNA, 260 bp, Unknown; identical to SEQ ID NO: 30842
  Description of Unknown: RightRegion for integrase B4992 sequence

SEQ ID NO: 30992 - DNA, 260 bp, Unknown
  Description of Unknown: RightRegion for integrase B4993 sequence
gttgatttcggtaggaacaagggtggagaagtccacctggacgtctacctgaaagaatagaaaaaggcccccggcaactgccaggggccttgcttataggtcaatgtccaactcaaccgggcaatggtcgctgcccataatgtcactatgtattttcgcgtctacgatcttatccttggcgcagtcatcgaccaggaaatagtctatccgccaccccgcatttttctccctggcatggaaacggtagctccaccaggaat

SEQ ID NO: 30993 - DNA, 260 bp, Unknown
  Description of Unknown: RightRegion for integrase B4994 sequence
gatcagtatgagctggagtttcacttgatcggcggattgaaattcaaagaaaacatataacagaaaatgccttgcagtaaaattgcagagcttttctttgttggttttggtactggatttccgcagaattttgtagtattgttgtacatggaggtgaaattagatgcccaaaaacagagtaataccgttcggctactgcatgaaaaacggcgaaataacgaccgaaccaaaagaagtttatgcagttgcagagattttca

SEQ ID NO: 30994 - DNA, 260 bp, Unknown
  Description of Unknown: RightRegion for integrase B4995 sequence
aaacgcagtcaacaagtacatatttattatttagggattggcaaaattgaccttgagtaaaatttgtacccaaacagtaacgcccttatgctcgttatttcaaacagcgctttgctccctctatccgccaccggcggcggtcgcaaggctaccaatcgaaccgattgtaaaatcggttcgacttaacacaaactatttgttaattaacatatctatatagcatagcaaaaactgtgtatatgttcgttttggttttgcaa

SEQ ID NO: 30995 - DNA, 260 bp, Unknown
  Description of Unknown: RightRegion for integrase B4996 sequence
aaagaggatgaaatgtccgtagaattccttggcggacttcgattcaaggaacgcatataggaggcagtcatgaaaaagacgcggtatatcccatatggatacacaatgcgcaatggcagaaccgtcatctcaggagaagaagcggaagttatcagagagattttcaattcgtatctgaacggagcttccttgaaggcaattgcggacgagttgaccgaccgccaaatcccctatacgcaaaagactgccatatgggacaa

SEQ ID NO: 30996 - DNA, 260 bp, Unknown
  Description of Unknown: RightRegion for integrase B4997 sequence
ataaaaaaagctgtaaagaagtgcatctgcagcaatgatgggcttcacattattttttaatgtcgttctatattttattcgtatcggtgtgcctgtctgccccatcatgtcgtgccccaggtgttctctcttataaccatagctcctggccacaccgaaatcatcatagtcattatagggaaaacttttcgcaatcggactgaatcctttcagtccatacttctttgtccagtttaccatccccgggctctcctggtcat

SEQ ID NO: 30997 - DNA, 109 bp, Unknown
  Description of Unknown: RightRegion for integrase B4998 sequence
gctgattttggtaggaacaagggcggagaagttcacctggacgtctacctgaaagaatagcgaaaagcccccggcaactgccaggggctttacttataggtcaatatcc

SEQ ID NO: 30998 - DNA, 109 bp, Unknown
  Description of Unknown: RightRegion for integrase B4999 sequence
ttttccgtggcgttgccttcccctcatctccaccaaatgctatgcagtcgaactttttaataactgcttatcttatacataaaaggctgattacagaagaaactgtaac

SEQ ID NO: 30999 - DNA, 260 bp, Unknown
  Description of Unknown: RightRegion for integrase B5000 sequence
aaagaggatgaaatgtccgtagaattccttggcggacttcgattcagggaacgcatataggaggcagtcatgaaaaagacgcggtatatcccatacggatacacaatgcgcaatggtagaacggtcatctccggagaagaagcagaagttatcagagagattttcaaatcgtatctgaacggagcttccttgaaagcgattgctgacgagttgagcgaccaccagattccttatacgcaaaagagcgctatatgggataa

SEQ ID NO: 31000 - DNA, 100 bp, Unknown
  Description of Unknown: RightRegion for integrase B5001 sequence
atcaaaatgatgacgggaaatcccgggtgttcgcgttgcgaacgtttggtgacccggtagggattcgaaccctagacctactgattcgtagtcagtcact

SEQ ID NO: 31001 - DNA, 260 bp, Unknown
  Description of Unknown: RightRegion for integrase B5002 sequence
aacgctgaccgctgcaatttcacgcttaacgtgacgccgctctttccggaaacagattaaaggcagtcagaaggctgtcttttttactgtcgaaatctggttcttgatttcctgatgaaaaaccttgactattcgttacgaatatgataaaatgattgagaggtgattctgtatggaaaccagaacagcaaggctcagcgtggggcattccgggggaactgccggagccgggagccgtaattataaagtcactctgccga

SEQ ID NO: 31002 - DNA, 260 bp, Unknown
  Description of Unknown: RightRegion for integrase B5003 sequence
gaacgcagtcaacaagtacatatttattacaaagagattggcaaaatcaaccttgagtaaattttgtacccaaacagtaacgccctattgtgcggtcaatcatcttgttaaggtcaacacccttgcgtacaagatagtctgacacaaagtcactcaacgttcgccattcggttgggttggttttcttaatcatatgtccggcttcatgtaaagctgtggcaaggattttctgacttgaaatttctgagcttaaaataatg

SEQ ID NO: 31003 - DNA, 260 bp, Unknown
  Description of Unknown: RightRegion for integrase B5004 sequence
aacgctgaccgctgcaatttcacgcttaacgtgacgccgctctttccggaaacagattaaaggcagtcggaaggctgtcttttttactgtcgaaatctggttcttgattccctgatgaaaaaccttgactattcgttacgaatatgataaaatgattgagaggtgattctgtatggaaaccagaacagcaaggctcagcgtggggcattccgggggaactgccggagccgggagccgtaattataaagtcactctgccga

SEQ ID NO: 31004 - DNA, 260 bp, Unknown
  Description of Unknown: RightRegion for integrase B5005 sequence
ggctgttcgactgagaagcaaatggtccgagtggcgagaatcgaactcacggcctcttgaaccccattgtgctccactcgtggacatgttggtcaaaacggcacacaatatacgctatatcactaatttcagaatccgttttttcattctatttcgtttgatgtcaagacgtttcattccttttgtggtcaaattgtggtcaaacgaccccgacaaatgacttttctcccccggctaagttacatcgcgcaatttcgatt

SEQ ID NO: 31005 - DNA, 260 bp, Unknown
  Description of Unknown: RightRegion for integrase B5006 sequence
aaggcagaccgcggcgaagggttcgtatgctgcgcgtcttgccctgttattaaaccttgaagcaagatagttgtttcaaggtttttttatgtttaaaaatgaaaatagatgtattataatgggcataaagtattaattttaaatgatattaattttgtatttcaaaatggattacaaatgtaaggaggatttttaaatgaaggaacagcttaagattaatgtgacgaagccacaatatgtgcaggtatctgatattacat

SEQ ID NO: 31006 - DNA, 260 bp, Unknown
  Description of Unknown: RightRegion for integrase B5007 sequence
gaacccatcagcctgcccggcgggttcggcctcatcatcccgctacgccgcgccgcctaagcctccaggcagcgccgagacgattctaccacggctagatgacgagcttctgacccgcgtagatgaggttcgggttgctgatgccgttcttggccgcgatggcctgataggttgtgccgaacttggcggcgatgccggaaagcgtgtcaccgctcttcacggtgtaggtggtctgcttgcccttgccgttgatgatgtcc

SEQ ID NO: 31007 - DNA, 260 bp, Unknown
  Description of Unknown: RightRegion for integrase B5008 sequence
gagtataacgcttcattacggcagccgaagttgtcgtattactccaaaatgaacaggtaataaaaatatgtatgcagaggagatacagactatgaattgcgtgatttacgcaagacagaacgacggcacaagcgtgtacgaacaatacaatcaatgtgcgacacttgcaaagcggtatggctattcaatagccgggaaagtgcttgattttgacggtactaaactccatgaagctataaacaaggtcattgcagaacacg

SEQ ID NO: 31008 - DNA, 109 bp, Unknown
  Description of Unknown: RightRegion for integrase B5009 sequence
aaatttgaaaaaagaacagctataatattaaatttagctgttcttttcttttttatataaaattacaaaatatccaatatctaaatatgtgacatctgctggtaccata

SEQ ID NO: 31009 - DNA, 260 bp, Unknown
  Description of Unknown: RightRegion for integrase B5010 sequence
aacaccctattctttatagggacactgttcggacaaacaacaaaacaccgagtagagtaataagctctgcccggtgttttgttgttggtgggtagagcgggtagagaaaaatcgcaatttcccataaactctcttatagtaactctcttatagactactttatgaaaaatacagatttactctacccactctacccgtaaggaggaatatatactcaacagcctgtcggctgagtgagccgtttaggactttttcagttc

SEQ ID NO: 31010 - DNA, 260 bp, Unknown
  Description of Unknown: RightRegion for integrase B5011 sequence
gcgcccggctcttctggtggttcggatttaaaacgccccgctctgcgtctatgctgttgatataaacgcctgctgctttcaatacctcttttgtcttatcaagctgcacctcaaaatcgcccttatggaaaagcgtaactctatacatttccctgcgctctttctcttcgtcgtctgcatttaccgcaggcgtacccagcagccgcagaaacgtataatatgcgtctggcttatcccgtccagtgtaaacgcctctctgg

SEQ ID NO: 31011 - DNA, 260 bp, Unknown
  Description of Unknown: RightRegion for integrase B5012 sequence
aaagaggacgaaatgtccgtggaactccttggcgggcttcgattcagagaacgcatataggaggcactcatgaaaaagatacggtacatcccatacggatacacgatgcgaaatggcagaacggtcatctcaactgaggaagcagagatcatccgagagatctttaaggcatatctggagggcgcttctctcaaagcaattgcggaagaactgaccggtcgccagatcccatatacgcaaaagaccaccacatgggataa

SEQ ID NO: 31012 - DNA, 260 bp, Unknown
  Description of Unknown: RightRegion for integrase B5013 sequence
aaagagggcgaaatgtccgtggaactccttggcgggcttcgattcagagaacgcatataggaggcactcatgaaaaagatacggtacatcccatacggatacacgatgcgaaatggcagaacggtcatctcaactgaggaagcagagatcatccgagagatctttaaggcatatctggatggcgcttctctcaaagcaattgcggaagaactgaccggtcgccagatcccatatacacaaagaaccaccacatgggataa

SEQ ID NO: 31013 - DNA, 260 bp, Unknown
  Description of Unknown: RightRegion for integrase B5014 sequence
aacaccctattctttatagggacactgttcggacaaacaacaaaacaccgagtagagtaataagctctgcccggtgttttgttgttggtgggtagagcgggtagagaaaaatcgcaatttcccataaactctcttatagtagctctcttatagaacactttatgaaaaatacagatttactctacccactctacccgtaaggaggaatatatactcaacagcctgtcggctgagtgagccgtttaggactttttcagttc

SEQ ID NO: 31014 - DNA, 260 bp, Unknown
  Description of Unknown: RightRegion for integrase B5015 sequence
gcggcggctggcgaactgtccaaaaagttcgcacaaggtcacgtcacctccatacaatagaaaaccgctctgtcgcagcaatacggcagggcggttttcttgtttgcagttctatgagatggtgaagattattctggcagatctggagccggttcaaaggtggaaaattactgctcctcaaaccttgaaagtgctagaaatcaaggtttcatgcgggttaatgccgtgatacattcgcaatggcttgagggttgcgtttg

SEQ ID NO: 31015 - DNA, 260 bp, Unknown
  Description of Unknown: RightRegion for integrase B5016 sequence
aatcagcatgaactggaatttcacttgatcggtggattgaagtttaaagaaaaaatatagaccgcattgacattttagcgtaattgtgataaaatatattcaggaggcgatgattatggatatgaatatgatcagacctgtttcggatttaagaaacaattttgccgatatttcaaagaccgttcacgaaaccgcacagcctgttttccttacaaaaaacggttacggcgatatggtagttatgagtatggaagcgtttg

SEQ ID NO: 31016 - DNA, 260 bp, Unknown
  Description of Unknown: RightRegion for integrase B5017 sequence
aaagaggatgaaatgtccgtagaattccttggtggactacgattcagggaacgcatataggaggcagtcatgaaaaagacgcggtatatcccatacggatacacaatgcgcaatggtagaacggtcatctccggagaagaagcggaagttatcagagaaattttcaaatcgtatctgaacggagcttccttgaaagcgattgctgacgagttgaccgaccaccagattccttatacgcaaaagagcgctatatgggataa

SEQ ID NO: 31017 - DNA, 260 bp, Unknown
  Description of Unknown: RightRegion for integrase B5018 sequence
aacgctgaccgctgcaatttcacgcttaacgtgacgccgctctttccggaaacagattaaaggcagtcggaaggctgtcttttttactgtcgaaatctggttcttgatttcctgatgaaaaaccttgactattcgttacgaatatgataaaatgattgagaggtgattctgtatggaaaccagaacagcaaggctcagcgtggggcattccgggggaactgccggagccgggagccgtaattataaagtcactctgccga

SEQ ID NO: 31018 - DNA, 260 bp, Unknown; identical to SEQ ID NO: 30842
  Description of Unknown: RightRegion for integrase B5019 sequence

SEQ ID NO: 31019 - DNA, 260 bp, Unknown
  Description of Unknown: RightRegion for integrase B5020 sequence
gccgctgcaaaaagcctagaagtttcaacgacttccgggcttttttgcgcccatttttagaggcgtgacaaaaagatgccaaaatgggctttggcaaattcgatggacctgtacctttacccaaggctttttgagccgcttttctgaggacttttcggaaaagcggctcttttttgtcctcggcaaagtgtagaatttcgaccggcgtttttgttggttatgccgaatgcgcactccaagcacagatgccggcacgttag

SEQ ID NO: 31020 - DNA, 260 bp, Unknown
  Description of Unknown: RightRegion for integrase B5021 sequence
gaactgtccaaaaagttcgcacaaggtcacgtcgcctccaccagtacaaaagccatctgaaaacgtaagttttcaggtggcttttgctatatctgctattccgtgcttttctgtcacgccagatctggcaggatatccgaccacagagcctgctcctgccgcaaggcatcaaagcagcagtccagatacattttgttgaccgccgcaaaaatggtgctgcgcagcagcagacgctcgtcgttgagcacagtctccggctg

SEQ ID NO: 31021 - DNA, 260 bp, Unknown; identical to SEQ ID NO: 30842
  Description of Unknown: RightRegion for integrase B5022 sequence

SEQ ID NO: 31022 - DNA, 260 bp, Unknown
  Description of Unknown: RightRegion for integrase B5023 sequence
aaggcagaccgcggcgaagggttcgtatgctgcgcgtcttgccctatttacaaatattaggccgttttatgtgggcggctggatggaggtaataatgagattaaaacaaacgttacttacaattgtgctcagcctttgtatggttgcagcaagtctgccaaatattgtttcggcagatgttaagccgcaggaccgttggacggattatgcagcagcttcttttgacggaggctgggtaccaaagccgacccttacaagat

SEQ ID NO: 31023 - DNA, 260 bp, Unknown
  Description of Unknown: RightRegion for integrase B5024 sequence
gcgcccggctcttctggtggttcggatttaaaacgccccgctctgcatctatactgttgatataaacgcctgctgctttcaatacctcttttgtcttatcaagctgcgcctcaaaatcgcccttatggaaaagcgtaactctatacatttccctgcgctctttctcttcgtcgtctgcatttaccgcaggcgtacccagcagccgcagaaacgtatagtatgcgtccggcttatcccgtccagtgtatacgcccctctgg

SEQ ID NO: 31024 - DNA, 260 bp, Unknown
  Description of Unknown: RightRegion for integrase B5025 sequence
aacaccctattctttatagggacactgttcggacaaacaacaaaacaccgagtagagtaataagctctgcccggtgttttgttgttggtgggtagagcgggtagaggaaaatcgcaatttcccataaactctcttatagtagctctcttatagactactttatgaaaaatacagatttactctacccgctctacccgtaaggaggaatatatactcaacagcctgtcggctgagtgagccgtttaggactttttcagttc

SEQ ID NO: 31025 - DNA, 260 bp, Unknown
  Description of Unknown: RightRegion for integrase B5026 sequence
acggcggctggcgaactgtccaaaaagttcgcacaaggtcacgtcacctccaccaactgaaagggcgagggtatttggtactgttattttcggacagtatcggatactctcgcctttatttttgttgctgatatgattcttcaaattgatttggggtttgctgtttaagacattcatgcggtcggtaatcgttataaaaatcaatatattctgatagactttcctctaattcggagacagtttcataaaaatgaaatttg

SEQ ID NO: 31026 - DNA, 68 bp, Unknown
  Description of Unknown: RightRegion for integrase B5027 sequence
gactgttcgactgagaagcaaatggtccgagtggcgagaatcgaactcacggcctcttgaaccccatt

SEQ ID NO: 31027 - DNA, 260 bp, Unknown; identical to SEQ ID NO: 31003
  Description of Unknown: RightRegion for integrase B5028 sequence

SEQ ID NO: 31028 - DNA, 260 bp, Unknown; identical to SEQ ID NO: 31017
  Description of Unknown: RightRegion for integrase B5029 sequence

SEQ ID NO: 31029 - DNA, 260 bp, Unknown
  Description of Unknown: RightRegion for integrase B5030 sequence
aacaccctattctttatagggactctgttcggacaaacaacaaaacaccgagtagagtaataagctctgcccggtgttttgttgttggtgggtagagcgggtagagaaaaatcgcaatttcccataaactctcttatagtagctctcttatagactactttatgaaaaacatagatttactctacccactctacccgtaaggaggaatatatactcaacagcctgtcagctgagtgagccgtttaggattttttcagttc

SEQ ID NO: 31030 - DNA, 260 bp, Unknown
  Description of Unknown: RightRegion for integrase B5031 sequence
gaaagcgacctctcaataaccctgcacccggtcgtcacttcttcaaaccctcaccgataacatcaatgtacgggtgaacttgcacacatggagatgatctccagcattctttatcagctgacccgtaatcttacgccggagcaaatccgcgagggcggcttcgatgcctactttatcgatcatacaaccggtatttatcctcagtctgccgccggtatcccgtggtcggccgcaaccttccagtccaagggcgaccccat

SEQ ID NO: 31031 - DNA, 260 bp, Unknown
  Description of Unknown: RightRegion for integrase B5032 sequence
aacaccctattctttatagggacactgttcggacaaacaacaaaacaccgagtagagtaataagctctgcccggtgttttgttgttggtgggtagagcgggtagagaaaaatcgcaatttcccataaactctcttatagtagctctcttatagactactttatgaaaaacatagatttactctactcactctacccgtaaggaggaatatatactcaacagcctgtcggctgagtgagccgtttaggattttttcagttc

SEQ ID NO: 31032 - DNA, 76 bp, Unknown; identical to SEQ ID NO: 30950
  Description of Unknown: RightRegion for integrase B5033 sequence

SEQ ID NO: 31033 - DNA, 91 bp, Unknown
  Description of Unknown: RightRegion for integrase B5034 sequence
cgctcttccggctccaccaaaaggtggcaacaatttggatattttaagcgcaacgcttagaataccaaagggttgccacctttttttattt

SEQ ID NO: 31034 - DNA, 260 bp, Unknown
  Description of Unknown: RightRegion for integrase B5035 sequence
gcggcggctggcgaactgtccaaaaagttcgcacaaggtcacgtcacctccaccaaatgaaagggcgagggtatttggtactgttattttcggacagtatcggatactctcgcctttatttttgttgctgatatgattcttcaaattgatttggggtttgctgtttaagacattcatgcggtcggtaatcgttataaaaatcaatatattctgatagactttcctctaattcggagacagtttcataaaaatgaaatttg

SEQ ID NO: 31035 - DNA, 260 bp, Unknown
  Description of Unknown: RightRegion for integrase B5036 sequence
gaacccgtcagccttcccggtgggttcggactcatcatcccgctacgccgcgccgcctaagcctctagactgcgctgggtcgattctaccacggctagatcacgagtttctgacccgcgtagatgatgttcgggttgctgatgccgttcttggatgcgatggcctgataggtggtgccgaacttggccgcgatgccggagagcgtgtcgccgcttttaaccgtataggtggttgacttgcccttgccgttgatgatgtcc

SEQ ID NO: 31036 - DNA, 75 bp, Unknown; identical to SEQ ID NO: 30957
  Description of Unknown: RightRegion for integrase B5037 sequence

SEQ ID NO: 31037 - DNA, 260 bp, Unknown
  Description of Unknown: RightRegion for integrase B5038 sequence
gaaagcgacctctcaataaccctgcacccggtcgtcacttcttcaagccctcaccgataacatcaatgtacgggtgaacttgcacacatggagatgatttccagcattctttatcagcttactcgtaatcttacgccggaacaaatccgcgaaggcggcttcgatgcctactttgtcgatcatacaaccggtatttatccgcagcctgccgccggtatcccgtggtcggctgcaaccttccagtccaagggcgaccccat

SEQ ID NO: 31038 - DNA, 260 bp, Unknown
  Description of Unknown: RightRegion for integrase B5039 sequence
ggatgccgtgcgtctcgctccagcgtttgccattgcatccggtcggtgtcatacatatagatttttccgttggctccccggtaccagacgaacacgccggggacccattggcggttgtatccgtcccacacgtccaggccccagaagcgcaggatgcacccgtctccgaactccagctccgcgtccggcgcagaatcgggggcgctgctctggcgcttgcccatgccggcggcattcacctccagatacagccgggaggc

SEQ ID NO: 31039 - DNA, 260 bp, Unknown; identical to SEQ ID NO: 30993
  Description of Unknown: RightRegion for integrase B5040 sequence

SEQ ID NO: 31040 - DNA, 100 bp, Unknown; identical to SEQ ID NO: 31000
  Description of Unknown: RightRegion for integrase B5041 sequence

SEQ ID NO: 31041 - DNA, 260 bp, Unknown
  Description of Unknown: RightRegion for integrase B5042 sequence
ggctgttcgactgagaagcaaatggtccgagtggcgagaatcgaactcacggcctcttgaaccccattgtgcttctctcaaaaacgcaatggacactccaataccacttgtacgcagtatcatcaaatttcaaaattattttatcattctgtttcgttagatgtcaagatgtttcgtttcttttgtggtcaaattgtggtcaaccgaccctgacaaatgaccattctcccctactaagttacatggcgcaattccgattt

SEQ ID NO: 31042 - DNA, 260 bp, Unknown
  Description of Unknown: RightRegion for integrase B5043 sequence
cataatccgaacatttactttactaaagactttatcattttggattatgtatttaagtaaagaaaaagacaaggttttaacgccttgccttttttgttgtttcatatccacaatattttagtagtgcttctttctctgacttggttaagtttagtctttgaatatagctcttaactttattttcgccaacggcgtttttgtagcctagatagcccataacaagatatttttctgctgcagttaagttttgtttagcaaca

SEQ ID NO: 31043 - DNA, 260 bp, Unknown
  Description of Unknown: RightRegion for integrase B5044 sequence
aatccgaacatttttgtaacgcttgacgtgttcgggttagtcgttcagattgaacgctaaagaaataaccccgctttccggtaagggaaggcggggttattctcttttcctgctcatagctgcgcgaatagcaagcgccgccatgcagtaatttgttatcgcttcgttcttttgcctgtaaagctccgacaggctcaacccatacattgcttgcagttttgcccgatgtcccgcatagcggcaacgccgatctatgaaga

SEQ ID NO: 31044 - DNA, 76 bp, Unknown; identical to SEQ ID NO: 30931
  Description of Unknown: RightRegion for integrase B5045 sequence

SEQ ID NO: 31045 - DNA, 260 bp, Unknown
  Description of Unknown: RightRegion for integrase B5046 sequence
ggctttttgcttatctgctgcatgattgatgaggcaattctatgcacctttgggctataacaaaatggaagaagttttattccggcgtacctgtgcggcatagggacggcctgaggacgcgatttgaaaaaggcatagatgcggatttgcgcaatgcctgcattcgcttttgcgattgggcaaggcatgaatactgtttcccgatacgggtatgcgtttatttcaaaaaggatgagttgatacgcgccatggatggggaa

SEQ ID NO: 31046 - DNA, 260 bp, Unknown
  Description of Unknown: RightRegion for integrase B5047 sequence
gttgatttcggtaggaacaagggtggagaagtccacctggacgtctacctgaaagaatagaaaaaggcccccggcaactgccaggggccttgcttataggtcaatgtccaactcaaccgggcaatggtcgctgcccataatgtcgctatgtattttcgcatctatgatcttatcctttgcgcagtcatcgaccaggaaatagtcgatccgccaccccgcatttttctccctggcatggaaacggtagctccaccaggaat

SEQ ID NO: 31047 - DNA, 260 bp, Unknown
  Description of Unknown: RightRegion for integrase B5048 sequence
aacaccctattctttatagggacactgttcggacaaacaacaaaacaccgagtagagtaacaagctctgcccggtgttttgttgttggtgggtagagcgggtagagaaaaatcgcaatttcccataaactctcttatagtagctctcttatagactactttatgaaaaatacagatttactctacccactctacccgtaaggaggaatatatactcaacagcctgtcggctgagtgagccgtttaggactttttcagttc

SEQ ID NO: 31048 - DNA, 260 bp, Unknown; identical to SEQ ID NO: 30842
  Description of Unknown: RightRegion for integrase B5049 sequence

SEQ ID NO: 31049 - DNA, 260 bp, Unknown
  Description of Unknown: RightRegion for integrase B5050 sequence
cgctcttccggctccaccatgcgaaaagccaccccttgtgggtggcttttcgcatgctgaaacggagtggcgcgagaagtcctgcgggttcgaccgcatgcagtctgccgcgtttacacggccgctgcgcgaaacgcaactcgaggagtattctcttcagtttcatcagaaatccattataattttgataaaactacggcggcttctttgttgcacggcattttcgtggatggtataatgagcgttagagaaagtaattt

SEQ ID NO: 31050 - DNA, 70 bp, Unknown
  Description of Unknown: RightRegion for integrase B5051 sequence
ggctgttcgactgagaagcaaatggtccgagtggcgagaatcgaactcacggcctcttgaaccccattca

SEQ ID NO: 31051 - DNA, 260 bp, Unknown
  Description of Unknown: RightRegion for integrase B5052 sequence
ggtgcaccaaagaatgccttacacgaaagtgtagggcatttttttgttgctctattttaagaaggcacgatctggtgcagcgtcggagatactcgaacagggcggcggcacgcagtgccgtaaggaacgccacagtgcggcgttccttagcccgcgggagagtccccgggaatgtggcgggtgtggaaaggcgaggcgatggggagaggcagggccttgaaatagaaaaagtgcaagtttgcaagagtgtttatggcaac

SEQ ID NO: 31052 - DNA, 260 bp, Unknown
  Description of Unknown: RightRegion for integrase B5053 sequence
gagggggacaagttcatttgtgatgtatcttgtcccgccaaacagaaaaccactagctgagctagtggaaagaaaaagcctcaggctatggacaaaaataaaactccttgttaaggtaaagttaggtttgccgaccaacaagaccagaaacaaggaggaccttatcgtggataaggacataagtagtttagagcatacacggtggagatgtcaataccatgttgtgtttgcgccgagaagcaatgaagaaagaatcttgt

SEQ ID NO: 31053 - DNA, 260 bp, Unknown
  Description of Unknown: RightRegion for integrase B5054 sequence
gttgatttcggtaggaacaagggtggagaagtccaccttgacgtctacctgaaagaataacaaaaagaggggctggcgttatgccagccccttgctttgcaactctttttttatgagcaactcgacgtagttactcacgttccgcccgtccgcgtcggccagcttttgcagctgggcctttaactcaggcgtcactcggatttgtaggcgttcagttttcatttttttctgcatccctttcgtttttttacagggtacac

SEQ ID NO: 31054 - DNA, 260 bp, Unknown
  Description of Unknown: RightRegion for integrase B5055 sequence
aaaaaggacgaaatgtctgtagaactccttggcgggcttcgattcaaagaacgcatataggaggcagtcatgaaaaagatacggtacatcccatacggttacaccatgcggaatggcagaacggtcatatccagcaaggaagcagaagtcatccgcgagatcttcaaggcatatctgggtggcgcttccctcaaaactatcgcagaggaattgaccggtcgccaagtcccttatacacaaaaaaccgccacatgggacaa

SEQ ID NO: 31055 - DNA, 77 bp, Unknown
  Description of Unknown: RightRegion for integrase B5056 sequence
ggctgttcgactgagaagcaaatggtccgagtggcgagaatcgaactcacggcctcttgaaccccattcaagcgcgc

SEQ ID NO: 31056 - DNA, 76 bp, Unknown; identical to SEQ ID NO: 30931
  Description of Unknown: RightRegion for integrase B5057 sequence

SEQ ID NO: 31057 - DNA, 260 bp, Unknown
  Description of Unknown: RightRegion for integrase B5058 sequence
gcgcccggctcttctggtggttcggatttaaaacgccccgctccgcgtctatgctgttgatataaacgcctgctgctttcaatacctcttttgtcttatcaagctgcgcctcaaaatcgcccttatggaaaagcgtaactctatacatttccctgcgctctttctcttcgtcgtctgcatttaccgcaggcgtacccagcagccgcagaaacgtataatatgcgtctggcttatcccgtccagtgtaaacgcctctctgg

SEQ ID NO: 31058 - DNA, 109 bp, Unknown
  Description of Unknown: RightRegion for integrase B5059 sequence
aaaggtcgtggtcacgaagatgactttaaactgaccatttatcctattatctcaaaataagtttgtttaccgatataaacgtgggtttgatgaacttaatcacctagaa

SEQ ID NO: 31059 - DNA, 260 bp, Unknown
  Description of Unknown: RightRegion for integrase B5060 sequence
aaaagaaacgtcaaggcgatcaacatgttaagcctgcaaatctatccgcaaaccccgtaattttttatcgtcaacatcaagtttagaattcgttgtaaacatcatgatgacaataaaatgccccgaaccgaaatggtcggggcatttattattatttactgacagggcgacgtatcctgcatatcaggttaccttgcggattgtcggaactcatgcattatctatatagcctcataggcagacgcttgtaccattctcat

SEQ ID NO: 31060 - DNA, 75 bp, Unknown
  Description of Unknown: RightRegion for integrase B5061 sequence
gactgttcgactgagaagcaaatggtccgagtggcgagaatcgaactcacggcctcttgaaccccattcaagcgc

SEQ ID NO: 31061 - DNA, 260 bp, Unknown
  Description of Unknown: RightRegion for integrase B5062 sequence
aaggcagaccgcggcgaagggttcgtatgctgcgcgtcttgccctgttattaaaccttgaagcgatatagttgtttcaaggttttttatgtttaataataaaaagatatgtattacaatgggaataaagtgtttattggtaattataatgaaataaatttgtatttcaaaatggattacaaatgtaaggaggatttttaatgaaggaaaagcttaagattaatgttacaaagccacaatatgtgcagatatctgatatta

SEQ ID NO: 31062 - DNA, 189 bp, Unknown
  Description of Unknown: RightRegion for integrase B5063 sequence
gttgatttcggcaggaacaagggtggagaagtccacctggatgtctacctgaaagaataacaaaaagaggggcgggcgttatgccagccccttactttgcagctcttttttaatcagcaactcaacgtagttactcacgttccgcccgtccgcgtcggccagcttttgcagctgggatttcaactcggg

SEQ ID NO: 31063 - DNA, 260 bp, Unknown; identical to SEQ ID NO: 30842
  Description of Unknown: RightRegion for integrase B5064 sequence

SEQ ID NO: 31064 - DNA, 260 bp, Unknown
  Description of Unknown: RightRegion for integrase B5065 sequence
tcatatcaacaacaagctgaaattattaacggaaaattagtcatttctttcttgttgtaaacagaaatcccccggtattttctaccgagggattttgttttttgagcggattataagatgtcgtcaattttacacttcaaagcctcagctaaggctttcgccattcgcagcgtcggttcgtgcgttccgttttcccatcttgctacacacacttgagaacaccctattttttcagcaagttcaacttgtgttaggcccgc

SEQ ID NO: 31065 - DNA, 260 bp, Unknown
  Description of Unknown: RightRegion for integrase B5066 sequence
gaacgcagtcaacaagtacatatttattacaaagagattggcaaaatcaaccttgagtaaattttgtacccaaacagtaacgccctaaaggcagtgcatttatgcacaacgcattgcgactatatttcagacgggaggatatcatccgcccgcattgatgaaatattatgtttaaataaaatcatttgatgttatcaaagttgtgtgtttaaatgtcaaagattgtaaaaacagagagtaccgctcgggttgcatagttt

SEQ ID NO: 31066 - DNA, 76 bp, Unknown; identical to SEQ ID NO: 30931
  Description of Unknown: RightRegion for integrase B5067 sequence

SEQ ID NO: 31067 - DNA, 260 bp, Unknown; identical to SEQ ID NO: 30846
  Description of Unknown: RightRegion for integrase B5068 sequence

SEQ ID NO: 31068 - DNA, 260 bp, Unknown
  Description of Unknown: RightRegion for integrase B5069 sequence
aaccgaacaaaatgggattccagcaaaccggaattaaagatttattttcatgatttttgatcttatttttatagcgtacagcatcgtggaactaattcattagttccatgatgttatctgttaacaaaaagcactcttttgagtgctttttattaacctgcctgattctgcaacccttggatcacttcttccagttccgccacctttgactgaagcttttccacctgttcgatcacagtttccgctttttctccatccac

SEQ ID NO: 31069 - DNA, 260 bp, Unknown
  Description of Unknown: RightRegion for integrase B5070 sequence
gaaagcgatattcaaatctatatgaattgctttgataaaactatgacacacaagagatagaataaatctatctcttaactgtgcatgtcactatggtgcagatgaggtgatcactttttgacatacacgaattatatgctatttcactttgtaatagggatgtttaaataaacgattacatcttcttcatttactattatttcatttactataagatccatcagctcttttaattgtggaactgatttttcctttaacat

SEQ ID NO: 31070 - DNA, 260 bp, Unknown
  Description of Unknown: RightRegion for integrase B5071 sequence
aaatccacgaacaccatctacttaacgccttcctacttctacatactggcgagactataaaagcctgtctcgcaccatgatagggattgaggcaggcattgatgttggcacttcgcagggagattttcagtaattgtttaatttacagttcgacgcgctgtaaaaataaaaacctaagaaaatcagtcatatatgtaaataaataaaataagaaacgtgttgtttggcacaagaggttcgcttatttccctgcgaagcgc

SEQ ID NO: 31071 - DNA, 109 bp, Unknown
  Description of Unknown: RightRegion for integrase B5072 sequence
ccggataataaaaaatcagcagccgaatgttcgactgctgatggagatggtggagcataggagattcgaactcctgacctcgacaatgcgaatgtcgcgcgctaccaac

SEQ ID NO: 31072 - DNA, 260 bp, Unknown
  Description of Unknown: RightRegion for integrase B5073 sequence
aatagggataatattcaaatttacatgtgttttgataagaagtttatacaagaacggtaaaatgcttattttgtgtccatcaaaatggctccactctggaggagccataatcggaacaagttatcttgttccgatttttttgtgttctcaaatattttgtaattcgatattttaattaattcaattcactttttgttgaaatacttacattatttgctaccaagtttccggaataagctaccacttagtcggaaaatgtt

SEQ ID NO: 31073 - DNA, 260 bp, Unknown
  Description of Unknown: RightRegion for integrase B5074 sequence
agcagaaaggaagtcggattcgccatgaagtgcggccccgtcttccgggaaaggatatgaggctatggaacacacaccgttcggatatgtgatcgttgacggcagaccgaaagtacacgatatggaggccgcgaggcttgccgcgctctactcggcataccttctcggaatgtcgtacgaaaatgccgccgaggtggcaggcatcaaagcgactcacagcatgatcaagcgtctgcttcacaataaacggtatcttgggg

SEQ ID NO: 31074 - DNA, 109 bp, Unknown
  Description of Unknown: RightRegion for integrase B5075 sequence
aaaatcgacctcgaaaacaatcatatcgatattgaatataggatcaaactgtttagttaattgtgaatatcacatcgatcccgaagtatccatcatggctataatgaca

SEQ ID NO: 31075 - DNA, 260 bp, Unknown
  Description of Unknown: RightRegion for integrase B5076 sequence
gaatctacgaacaccatctacttaacgccttcctacttctacatactggcgagactataaaagcctgtctcgcaccatgatagggattgaggcaggcattgatgttggcacttcgcagggagattttcagtaattgtttaatttacagctcgacgcgctgcaaaaataaaaacctaagaaaatcagtcatatatgtaaataaataaaaataagaaacatgttgtttggcacaagaggttcgcttatttccctgcgaagca

SEQ ID NO: 31076 - DNA, 260 bp, Unknown
  Description of Unknown: RightRegion for integrase B5077 sequence
ccagacaataaaaaaacagcggtcgaatgttcgaccgctgataaaaatggtggagcatagcggattcgaagcggagaacgcacttcccattgcgtcccaatcagtaccatatggtaacattctgaaaccaaaatcagcatttgcagcttaacaaatcacatggaataccactccgttgtgggtacaattgtgggtacgcatcgtggtgcagtgtcgaggaaacacagacaatatccaagtttccggctaacctataatga

SEQ ID NO: 31077 - DNA, 109 bp, Unknown
  Description of Unknown: RightRegion for integrase B5078 sequence
atagacaaaatcaagtgggatggcgaaaaattcaagatttcttttataaaaaaatcataggaattaacagagtactgcaccacctggtcttccgccaataatatcttta

SEQ ID NO: 31078 - DNA, 109 bp, Unknown; identical to SEQ ID NO: 31071
  Description of Unknown: RightRegion for integrase B5079 sequence

SEQ ID NO: 31079 - DNA, 260 bp, Unknown
  Description of Unknown: RightRegion for integrase B5080 sequence
gttgattttggtaggaacaagggtggagaagtccacctggacgtctacctgaaagaatagaaaaaggcccccggcaactgccaggggccttgcttataggtcaatgtccaactcaaccgggcaatggtcgctgcccataatgtcactatgtattttcgcgtctacgatcttatccttggcgcagtcatcgaccaggaaatagtcgatccgccaccccgcatttttctccctggcatggaaacggtagctccaccaggaat

SEQ ID NO: 31080 - DNA, 260 bp, Unknown
  Description of Unknown: RightRegion for integrase B5081 sequence
ttccgaaacgaaaaccccgccgaatatcttacgttgactatctatcccattgtggattaattttttgcagagaatagagacaaccttgtggtcgcgattcatcgcgaccacaaggctcccactattattttgctacttccagccatcgatcatcgccttaacctcggcggtcttggcgatgaggtcgttgtggatggcttcccacgcggcgatcatgccgtcggcgtaggcgggcttttgcttgtactcctcggaggcct

SEQ ID NO: 31081 - DNA, 260 bp, Unknown
  Description of Unknown: RightRegion for integrase B5082 sequence
aaaaacaatgcactgacaccaaacttcgagctgcacatctacccgaacttgatggattgattgtgcgcataacatatatgattaacgtccatatgtatatgcacatgtatgatatatgttaatttaatctgcccacacacgcacaaagacacaaaaaaaggcggggtaatttccaccccgccttaaattgatgcactactttaatttttcatatagtcggctcaccactgccgcgacctcagcgcgtgtgatgggcgcat

SEQ ID NO: 31082 - DNA, 260 bp, Unknown
  Description of Unknown: RightRegion for integrase B5083 sequence
gttgttgaaaagttcgtacaccgtgcgtcatgctccaccaaaaagcactgtacttcgtaggaagtatggtgcttttctttttgctgaagccgatttttgggggctgcattgcttcgcctgcaccgttttcaggcttttgcaggcggttcctatataacctccaatttttgactttacaccgttttcaaaaaggaatgtttgccgcccggtttttcagcaggctgctgcatcatccccttcaatgtacggcgtaaggtcga

SEQ ID NO: 31083 - DNA, 260 bp, Unknown
  Description of Unknown: RightRegion for integrase B5084 sequence
aacacgatattgtttcttggtcatgttatggtttatacaacaaaataccggacgaattagttttcgtccggtatttttgttatttgcatcattcggtatttccatcattgtcaacgtcatcgttatgtacgggggtgcgtttctctgcactctgctcctgcccctctccggattcggaaaagccgggtaattcaattttcgtgatgtcctcaccgctcgccgccgctttcatcaactgtttgaaaatttgatttgttccg

SEQ ID NO: 31084 - DNA, 260 bp, Unknown
  Description of Unknown: RightRegion for integrase B5085 sequence
aatgcaccagctcggtggagccgaggtccgagaagtacgagcctgtatgcccgccgataaagaccgtgccgttctcgccgggcagcacacagtcactctcggatcggcagcctgcaccgcggctgaactgggtctcgctgtcgccccaatagaggtcgcagtcgacgtcggttccctcgatccagatgcggcccagcttatcgccgtactggatgcggtcgcgggcattcagggcagcggctatctgttccgtacgcttg

SEQ ID NO: 31085 - DNA, 260 bp, Unknown; identical to SEQ ID NO: 30914
  Description of Unknown: RightRegion for integrase B5086 sequence

SEQ ID NO: 31086 - DNA, 194 bp, Unknown
  Description of Unknown: RightRegion for integrase B5087 sequence
aaatccacgaacaccatctacttgacgccttcctatttctatgtgctggcgagattataaaagcctgcctcgcaccatgatagggattgagacaggcattgatgttggcacttcgcagggagattttcagtaattgtttaatttacagttcgacgcgctgtaaaaataaaaacctaagaaaatcagtcatatat

SEQ ID NO: 31087 - DNA, 260 bp, Unknown
  Description of Unknown: RightRegion for integrase B5088 sequence
gaatctacgaacaccatctacttaacgccgtcctacttctacatactggcgagattataaaagcctgcctcgcaccatgatagggattgaggcaggcattgatattggcacttcgcagggagattttcagtaattgtttaatttacagttcgacgcgctgtaaaaaataaaaacctaagaaaatcagtcatatatgtaaataaataaaataagaaacgtgttgtttggcacaagaggttcgcttatttccctgcgaagcg

SEQ ID NO: 31088 - DNA, 260 bp, Unknown
  Description of Unknown: RightRegion for integrase B5089 sequence
aaatccacgaacaccatctacttaacgccttcctacttctatgtgctggcgagattataaaagcctgcctcgcaccatgatagggattgagacaggcattgatgttggcacttcgcagggagattttcagtaattgtttaatttacagttcgacgcgctgtaaaaataaaaacctaagaaaatcagtcatatatgtaaataaataaaataagaaacatgttgtttggcacaagaggttcgcttatttccctgcgaagcgc

SEQ ID NO: 31089 - DNA, 260 bp, Unknown
  Description of Unknown: RightRegion for integrase B5090 sequence
tcaggactttcggatgtgtcaaaaagttcgcctatactctccaacggtcaaccagactaaagccatctgaggaaactcaggtggcttttctgtttgtatgattccgcgcggcgcaacgattcagaatgccctccgctttgctctgggcattttcagcggaaggattattttaatatttcgcgtttgtcgcactctgcggagtgctccaaacgctattttcacaggaggggccgcaatggttaaagagcagtctaaatcac

SEQ ID NO: 31090 - DNA, 260 bp, Unknown
  Description of Unknown: RightRegion for integrase B5091 sequence
gaggtactcgataattataaggtcagggatgagataaggagggtttatgttagcgagtaatgtaaaagtaattcaaccaagaaaattattcaatatagaagagagcgcaaggcagcttttaagggttgcgggatatgctcgtgtgtccacggggagacctgaacagaaaaccagttttgagtcgcagcaaaagcattataaagagttggtggcgaagcactcggattggatagatgtcggtttgtatgccgatgagggca

SEQ ID NO: 31091 - DNA, 260 bp, Unknown
  Description of Unknown: RightRegion for integrase B5092 sequence
aatactccagatagggaatccaagtactatctcatcataattctcaatgtgtgcatttgaatcatcaagctccggtctaagcttcttgtcgctcatctcgacgctgctcctggatttcttgttcatccagtcgaggtcagccttggtgtacagctcctttggtttgatctcgtacaaatctgcgcctgctgcctccgatatcatctctgcaacctttttcgtggttccacttgcgctgaaatatgctataagcttttttg

SEQ ID NO: 31092 - DNA, 260 bp, Unknown
  Description of Unknown: RightRegion for integrase B5093 sequence
gtcagctccaccacgatggagtcgaactccgggtcgccccccacgcgggggcgtgagtagaaattctttcctctgacggcgctcccatgctgacgatgtcgccccccacgcgggggcgtgagtagaaatatgaatgtattccaccatgtccacccactccttacgtcgccccccacgcgggggcgtgagtagaaattggcagcgcaatgcccaaattggggaaatgggtaggtcgccccccacgcgggggcgcaagtaga

SEQ ID NO: 31093 - DNA, 260 bp, Unknown; identical to SEQ ID NO: 31087
  Description of Unknown: RightRegion for integrase B5094 sequence

SEQ ID NO: 31094 - DNA, 260 bp, Unknown
  Description of Unknown: RightRegion for integrase B5095 sequence
gaggtgctggatttttataaaacgagagacgaaataaggagggtctatgttaccgagtaatgtgaaaataattaaaccgcgcgctcaagtggtgattgatgagcaaccgcttattcaatacataagggtggcgggctatgcaagggtatccacagggaaaccggagcaaaagacgagctttgagtcacaacagaaacattataagagtttggtcgctcgccaccccgattggattgatgtcggtctgtacgccgatgagg

SEQ ID NO: 31095 - DNA, 260 bp, Unknown
  Description of Unknown: RightRegion for integrase B5096 sequence
aatactccagatagggaatccaagtacgatctcatcataattctcaatatgtgcatttgaatcatcaagctccggtctaagcttcttgtcgctcatctcgacgctgcttctggatttcttgttcatccagtcaaggtcagccttggtgtacagctcctttggtttgatctcgtacaggtctgcgcctgctgcctccgatatcatctctgcaacctttttcgtggttccacttgcgctgaaatatgctataagcttttttg

SEQ ID NO: 31096 - DNA, 64 bp, Unknown
  Description of Unknown: RightRegion for integrase B5097 sequence
tcaggtacgtatggtgccgaaggccggactcgaaccggcacgtggggtaaccacgcttgatttt

SEQ ID NO: 31097 - DNA, 260 bp, Unknown
  Description of Unknown: RightRegion for integrase B5098 sequence
caacatgagttggaatttcacttgatcggcggattgaaatttaaagaaaagataaaatagacaaattcattatcatagatttagtgcctttggatatagctatttcaaaggctttgtggtattgttataagcggaggtgacattaatatggcaaaaaacagagtaataccgtttggttactgcatgaagaacggagtgataacaactgatcccaaagaggtatgcgctgttgcgacgattttcagtgaatatctttcagg

SEQ ID NO: 31098 - DNA, 260 bp, Unknown
  Description of Unknown: RightRegion for integrase B5099 sequence
accttgtttttcgtcaaacattgcttcggatttgttatgaacatagaggaggtaggctgattatgcctacctcctcttgttgtgtgaagttattgttcttgttcttggcgaagtagttaaagtagttgttcttgggtttttgcgtgtaacttttgcttagtatgcgcatatatagagaaagtttacgcaaaaaccgattttgaactacttttactacttctgctcggcctgtttcagctccaagacagcggactcaatga

SEQ ID NO: 31099 - DNA, 109 bp, Unknown
  Description of Unknown: RightRegion for integrase B5100 sequence
gaaagcgacctctcaataaccctgcacccggtcgtcacttcttcaagccctcaccgataacatcaatgtacgagttcttcggtaccaatatcggtaaggattcccttgc

SEQ ID NO: 31100 - DNA, 260 bp, Unknown
  Description of Unknown: RightRegion for integrase B5101 sequence
aatgaaaatccggcggccgctctctccctccgtctctatcctcggaggcatataaaataaaggggtatcatgtggggaaggattcgtcgcacaccgaatccgcaaactcttcacacggcggcacttcgcagtagccgtagctcggcacaagaatctccaccttagccagcaccttgagcacgacggtcacgcagatttccagctcaaacacattgttgcgcagatatgtaccggatacgcagatcgcggaaaccatcgat

SEQ ID NO: 31101 - DNA, 260 bp, Unknown
  Description of Unknown: RightRegion for integrase B5102 sequence
gccggaagtcgcttccggctctattatcctcgagcggagcaaacccacctttccgcttagtataggatcttgctataggatcttgccatgtttgacggtaaaatgacgaaaggtcaacttttgcatatgctaaagaagctatgcgaacttgccggaaggcgcgaggaagggataggggaaaatggaaaagttctgttccgcttggtggcgtatttcgccaaagagggcaatggccgagccgaacggagaagagaataagc

SEQ ID NO: 31102 - DNA, 260 bp, Unknown
  Description of Unknown: RightRegion for integrase B5103 sequence
tccaatgcaccaccaaagttgtccgttcgattccgtacctcatacgaatcgcagggctgaaattcatatcgtaccgcgtaaaatcaaaaagaaagagtaacatttctagggaacgaaaatttggcacctaaaaatgttactcttttatatccctaaaaatgttactaccggactacgttaaagccaatggaagaggtcggtttttgagcaaagaatcacttccaaatacgggtcagattcggtcggaattgcagtgtaaa

SEQ ID NO: 31103 - DNA, 260 bp, Unknown
  Description of Unknown: RightRegion for integrase B5104 sequence
aattatagatctacagcttctagaaaactatatactaaagcacgtaaatgtgtaggttgaaatttaatcgctaatagtaattatattatcattttcaatattgtccagtatttcttttgagattgctatgcgttcttctggcgtatagcattttttccattccagttcacgaggatcttctactttttcgctccaatcttcatcaagcagctcattatcaatcattttatttatcctccaatcataagtgctatatttat

SEQ ID NO: 31104 - DNA, 260 bp, Unknown
  Description of Unknown: RightRegion for integrase B5105 sequence
ctcaccagctccaccaatttgccgcatcgttttgtacgatgcggcgttttttatgcctaaaaaacattggcagaccgtgccgggctccgaaccctgaagtcggatgcgaaccgggcggggtcatcaatatattttttgaaaatccatcggtttcacgcttctttctttgcattttgcagagtgctgcgggcaagcgcatcgcttttatgcccccttctcggaaatttcttcaaaaatctccgcaccatcgtaggtcgata

SEQ ID NO: 31105 - DNA, 260 bp, Unknown
  Description of Unknown: RightRegion for integrase B5106 sequence
gacaagcgctcttccggctccaccataaaagtttcgagattggttccgctacttttgtagagcttaacgatgccgatttggctttgacgaactctcgtctctcgtataatcaagccatatacgatttcttagcggcaaaatccgatttgcaattgctgttgggtaataccgatttggaacaatataaacaagtgaaaagccaagataagtaatacattcatagaataatataagaaaataaacatatgaaaagaaatcat

SEQ ID NO: 31106 - DNA, 260 bp, Unknown
  Description of Unknown: RightRegion for integrase B5107 sequence
aacgacacgccgccatatgtgctaccgaacaggatcaggctcgatgtccacctccggtagtctctataaccatgttttatgggtcgacgaagaaatacagcagctggctcaaattgaaaggagagtggaaatggaaaattattacaagggcagaagaatagctccctttagcggcaagatttacaacgtgtactgcgatgaaagctgccatttgcaaaacgatagatttaaggctatgtcaatcggagcggtttggtgtc

SEQ ID NO: 31107 - DNA, 260 bp, Unknown; identical to SEQ ID NO: 31106
  Description of Unknown: RightRegion for integrase B5108 sequence

SEQ ID NO: 31108 - DNA, 260 bp, Unknown
  Description of Unknown: RightRegion for integrase B5109 sequence
aacgaaaacccggcaaatgccctgaccctctccgtctatccccgcagatataaaaaataaagggatatcatgcagagaagaattcatcgcatacagaatccgcaaactcctcacacggcggcacttcgcagtagccatagctcggcacgagaatttcgacctttgccagcaccttaagcacgacggttacgcagatttccagctcaaacacgttattgcgcaaatatgtaccggatacgcagattgcggagaccatcgcc

SEQ ID NO: 31109 - DNA, 260 bp, Unknown
  Description of Unknown: RightRegion for integrase B5110 sequence
aatgaaaatccggcggccgctctctccctccgtctctatcctcggaggcatataaaataaaggggtatcatgtggggaaggattcatcgcacaccgaatccgcaaactcttcacacggcggcacttcgcagtagccgtagctcggcacaagaatctccaccttagccagcaccttgagcacgacggtcacgcagatttccagttcaaacacattgttgcgcagatatgtaccggatacgcagatcgcggaaaccatcgat

SEQ ID NO: 31110 - DNA, 260 bp, Unknown
  Description of Unknown: RightRegion for integrase B5111 sequence
agatcggaaatcgtattccaattgatcggcggtctaaaactgaccgaaagcatcgcatgaaaggacggcgaaaacagatatgaaaaacaggaacatacccttcggatacagattcgaaaacggaaagatcattatcagcgctgacgagcataccacacttcagcgaatctgctccgaatacctcgacggacggtcactcctgcagattgcaaatggattgcagacagacagggtagagtttgcacccggcataacgacat

SEQ ID NO: 31111 - DNA, 260 bp, Unknown
  Description of Unknown: RightRegion for integrase B5112 sequence
aaatcgggaattgccttctatctgatcggcggccttaaactgaccgaagccatagcatgaaaggacggtgaaaaagaatatgaaaaacagaaacatacccttcggatacagatacgaagatggaaagatcgtcgtcaatccagacgagcagaacacacttcaaagaatctgctccgaataccttgacggacgctcgcttctgcagatcgccaacggtctggaatcagacaaggtggagttcgcacccggcattatcacat

SEQ ID NO: 31112 - DNA, 260 bp, Unknown
  Description of Unknown: RightRegion for integrase B5113 sequence
aaatcggaaattgccttccatctgatcggcggccttaaactgaccgaaaccatagcatgaagggacggtgaaaaagaatatgaagaacaggaacatacccttcggatacagattcgaagatggaaagatcgtcgtcaatccagacgagcagaacacacttcaaagaatctgctccgaatacctcgacggacgctcgcttctgcagattgccaacggtctggaatcagacaaagtggagttcgcccctggtattatcacat

SEQ ID NO: 31113 - DNA, 260 bp, Unknown
  Description of Unknown: RightRegion for integrase B5114 sequence
cacatcggtctcaggcgaacaccatatatcatctttatggtctcgcttgcgacaaaataacgaaaaccgaggggatagcccctcggttttttgttactcattcacgcgctccgattagctgaatgattgtccccattgatcccgcctgataaatgcgaatttccttcgcgcgggcgctgaaagccatctcgttgtcgtcatatattttcagccagtgtgcgaaggtggcttcgagcttgtaatggctcgggatttcacac

SEQ ID NO: 31114 - DNA, 260 bp, Unknown
  Description of Unknown: RightRegion for integrase B5115 sequence
aagcgatatatcgcttactctgtttttttttgcaagcgtgctcaaaacggtgagcagtagctaccacatttgtgcgagttaagtaccttcggcacatttgaaaacattatatgaaaagtgtataatatctttgagtggattttgtaacgagaaacttgacagagaaatggggaaagaatataatgaactataagaaatgcaagcttgacttttagaaacttagttaattgaaaataaggctataaaaaacaaataaaatt

SEQ ID NO: 31115 - DNA, 260 bp, Unknown
  Description of Unknown: RightRegion for integrase B5116 sequence
gaaaacaattcagaattcattttagacgtctatatcaagagtgatggggcaatggtctgacccatatacatccgttaaaatatcagctgattttattacatccttggcaaattcggatgccagaaaataatcgatccgccatccagcgttattcttgcgagcgttaaaacgataactccaccacgagtattttatctcgtctgggtgtaaccatctataggtatcaataaaccctgactgcagcagttgttgaaattttt

SEQ ID NO: 31116 - DNA, 260 bp, Unknown
  Description of Unknown: RightRegion for integrase B5117 sequence
gaaagcagcgaggataccagtgttcttatagattccctcggggtgtacggaagagtttgaaacgaaagtttcagactctttttttgtggtgcacccggcatgggcaacaaagtggggttctttgtcaaatgtaggggtgagggctaacggttatttgccaaatgttggggtgggcggaagccttgtcctgaaaacggctgggtttctggatggaatgatccgtaaaagtatcggtttcgtattgacaagtgtgtttgttc

SEQ ID NO: 31117 - DNA, 260 bp, Unknown
  Description of Unknown: RightRegion for integrase B5118 sequence
aaggcagaccgcggcgaagggttcgtatgctgcgcgtcttgccctgttattaaaccttgaagcaagatagttgtttcaaggttttttttgtttaaaaatgaaaatagatgtattataatgggcataaagtatttattttaaatgatattaattttgtatttcaaaatggattacaaatgtaaggaggatttttaaatgaaggaaaagcttaagattaatgtgacgaagccacaatatgtgcaggtgtctgatattacata

SEQ ID NO: 31118 - DNA, 260 bp, Unknown
  Description of Unknown: RightRegion for integrase B5119 sequence
agtcgttggaataaggatgcacaagataaattcactcttgaattagagctattactttaacatacatcataaacaaacagaagaaatggcacacgtagaaataatagctacaatggctcatcaaattatggaaaatgcatcaatagaagaaattaaagctgctggaatggatggacattatgcggatcacggaaaagctactttctatactgatgctactggaaatccttggactgctacttatatccaagctaaaggtg

SEQ ID NO: 31119 - DNA, 109 bp, Unknown
  Description of Unknown: RightRegion for integrase B5120 sequence
gaaagcagcgaggataccagtgttcttatagattccctcggggtgtacggaagagtttgaaacgaaagtttcagactctatttttgtgcgcgtttggtatgaaaagcgg

SEQ ID NO: 31120 - DNA, 260 bp, Unknown
  Description of Unknown: RightRegion for integrase B5121 sequence
ctcgtcagctccaccaatttgccgcatcgttttgtacgatgcggcgttttttatgcctaaaaaactttggcagaccgtgccgggctccgaaccctgaagtcggatgcgaaccgggtggggtcatcaatgtactttttgaaaatccatcggttccacgcttctttctttgcattttgcagagttctgcgggcaagtgcatcgcttttatgcccccctctcggaaattccttcaaaaatttccgcaccatcgtaggttgaca

SEQ ID NO: 31121 - DNA, 260 bp, Unknown
  Description of Unknown: RightRegion for integrase B5122 sequence
gttgacaaggcagaccgcggcgaagggttcgtatgctgcgcgtcttgccctgctatttaaaggatttaagttgaatttcagcttgaatcctttttttgcatttaaaaagattaattataaagttgctaaaactatataataataatgatgaggagataatcatgaatgaatctaaatatgagcatatagtacacccatttccaccgttgtataacagtgaatcaagaatactgatacttggaagtctgccatcagttaag

SEQ ID NO: 31122 - DNA, 260 bp, Unknown
  Description of Unknown: RightRegion for integrase B5123 sequence
cacatcggtctcaggcgaacaccatatatcatctttatggtctcgcttgtgacaaaataacgaaaaccgagggttcagtccctcggttttttgtttaattgtatttttgcattaacattgccagagctgctttcgcttccggagttttggtagaaatatcagctgcgcgatcatagttgtataccgtctcttcgtcctgctcgagcgtgagtttcgatatcttaccgttctcaatgccccacgggctcggttcatcgtaa

SEQ ID NO: 31123 - DNA, 109 bp, Unknown
  Description of Unknown: RightRegion for integrase B5124 sequence
cccgaaagcgacctctcaataaccctgcacccggtcgtcacttattcaaaccctcactgataacatcaatgtacgggtgaacttgcacacatggagatgatttccagca

SEQ ID NO: 31124 - DNA, 260 bp, Unknown
  Description of Unknown: RightRegion for integrase B5125 sequence
ggaagatgggaaaaaggtaatattaacaaatttgtgttagaaatagtattgaaaatttaacttacatatgtgatgtcttaatgaacttggtcatgttgaaatgatttgtgctatgatatatcaactaaccgaaggtgttagtaaagaagaacttatgaaggcaggatttgatgctcattatgttgaacatggacttgatttgttccctacaaatgcgaatggaattaattttactactgattatatatctgctgttgggg

SEQ ID NO: 31125 - DNA, 260 bp, Unknown
  Description of Unknown: RightRegion for integrase B5126 sequence
aaggcagaccgcggcgaagggttcgtatgctgcgcgtcttgctctgttattaaaccttgaagcaagatagttgtttcaaggtttttttatgtttaaaaatgaaaatagatgtattataatgggcataaagtatttattttaaatgatattaattttgtatttcaaaatggattacaaatgtaaggaggatttttaaatgaaggaaaagcttaagattaatgtgacgaagccacagtatgtgcaggtatctgatattacat

SEQ ID NO: 31126 - DNA, 260 bp, Unknown
  Description of Unknown: RightRegion for integrase B5127 sequence
aaggcagaccacggcgaagggttcgtatgctgcgcgtcttgccctgttcttaaaccttgaagcaagatagttgtttcaaggttttttatgtttaaaaatgaaaatagatgtattataatgggcataaagtatttattttaaatgatattaattttgtatttcaaaatggattacaaatgtaaggaggatttttaaatgaaggaaaagcttaagattaatgtgacgaagccacaatatgtgcaggtatctgatattacata

SEQ ID NO: 31127 - DNA, 260 bp, Unknown
  Description of Unknown: RightRegion for integrase B5128 sequence
ccaaatgtgaatcaggcgaaccccccacgatctacttcgtgggtgcgttcttcgtcctgaccatgccgctccctgagcggtaaaaaataggcactcggccttgatagccgggtgcctatttctttttgccctgctgacaatataaacaacatagtgcggtcaataattgtgcagtatacaccttgataaccatgcgtatgtatggtaatatacagacacaataaaggacgggggtaaatcaaaaatgaccgctaaatact

SEQ ID NO: 31128 - DNA, 260 bp, Unknown
  Description of Unknown: RightRegion for integrase B5129 sequence
aaaaaggggcaggatcgttctgattttgaaattgatgtgttcccaaaagtgccgaaatagcggcgtttttcgttcgttgcatcttctacgagcgaaagaactcgctcacatggaaatggtatgcgccatcgtttatcagctcaccaaggacctttctccggaggaaatcgaacgctccggatttgctccttattatgtagatcacacacttgctctctggccacaggcagcaagcggcgccccatggacagcaacttatt

SEQ ID NO: 31129 - DNA, 260 bp, Unknown
  Description of Unknown: RightRegion for integrase B5130 sequence
aaaaagaaccagaaaaactctgaatttatgattgatgtgtacccgaaagtaccgaaataatggtgctttcggattctattcattagttgcatcttctacgagcgtattcctccgtgccgatatccgtaagtgttgcggtcacctctttatatggcatggtataccgctgagataaataccgcattgatgcagcgagctccccgtccggtccaccaaataacaataacctataatatttctacatattataaatatacacg

SEQ ID NO: 31130 - DNA, 260 bp, Unknown
  Description of Unknown: RightRegion for integrase B5131 sequence
gaagtgttcggacgctgtgcgcaaagtcctgccaaaagccgcttatctcgtttgaggtaagcggctttttgtttttgctgcgtcttaggggctgcatatatgcggtccgcgggttggcgggagcgacccgaccacggctggcatctaggattctaaacaggcgtttacttacgatgcgccgaaaaaagaggatgtggactgatccacatcctctaaaacaaaaacaaatccgaaacaatgcttcacaaaaaagattgagt

SEQ ID NO: 31131 - DNA, 260 bp, Unknown
  Description of Unknown: RightRegion for integrase B5132 sequence
aagaagaatcagaaaaactccgaattcactattgacgtttacccgaaagtaccgaaataatggtgctttcggattctattcattagttgcatcttctacgagcgtattctttcgcacatctaagatgcaactaatacacattaaataagtagtaactttttgataaaaataagattgatacaatattcacccctcagagagctaatcttcgaggggatttttattagaataactggaaccgatcaattgcctgtccgaac

SEQ ID NO: 31132 - DNA, 260 bp, Unknown
  Description of Unknown: RightRegion for integrase B5133 sequence
aaaaaggggcaggatcgttctgattttgaaattgatgtgtttccaaaagtgccgaaatagcggcgtttttcattcgttgcatcttctacgagcgaaagaactcgctcacatggaaatggtatgcgccatcgtttatcagctcaccaaggacctttctccggaggaaatcgaacgctccggatttgctccttattatgtagatcacacacttgctctctggccacaggcagcaagcggcgccccatggacagcaacttatt

SEQ ID NO: 31133 - DNA, 260 bp, Unknown
  Description of Unknown: RightRegion for integrase B5134 sequence
gaaataatagtaaatgataaagatgtaatcgtttatttaaacatccctattgtgaattgaactgtaaagaatgtgtatgtcaaaaagtaatcacgtcatctgcaccaaaatttataaaccgtataaatgcttgaatgtcaagtgtttatgcggttttttagtacttacgagaagaaaatcaacgtgataaaaagtgataaaatgtgattgatgtcactttgctatcaaaaaaaaacaatgaaattttatcgtcagacatt

SEQ ID NO: 31134 - DNA, 260 bp, Unknown
  Description of Unknown: RightRegion for integrase B5135 sequence
aaaaagaaccagaaaaactctgaatttatgattgatgtgtacccgaaagtaccgaaataatggtgctttcggattctattcattagttgcatcttctacgagcgtattcctccgtgccgatatccgtaagtgttgcggtcacctctttatatggcatggtataccgctgagataaataccgcattgatgcagcgagctccccgtccggtccaccaaataacaacaacctataatatttctacatattataaatatacacg

SEQ ID NO: 31135 - DNA, 260 bp, Unknown
  Description of Unknown: RightRegion for integrase B5136 sequence
aagaaaaaccagaaaaactctgaattcacaatcgatgtgtacccgaaagtgccgaaataacggtgctttcggagtatatttattagctgcatcttttacgagcgtattcctccgtgccgatatccgtaagtgttgctgtcacctctttatatggcatggtgtaccgctgagataaataccgcatcgatgcagcgagctccccgtccgggccaccaaataacaataacctataatatttctacatattataaatatacacg

SEQ ID NO: 31136 - DNA, 260 bp, Unknown
  Description of Unknown: RightRegion for integrase B5137 sequence
tggtccgccgagaacgacctctccgtcaccatccaccccaaaatttccgcccgcaaataacacctaacattgcaatccgcgtgaagcggaactgctctgtgtttccattgatgttgagcggattcagtttaatcgaggtttctacagcgttgatatccgctttttctatcgcattgaatgtgaaatcagctgcgtaatcggtcgtccgcgtattgtggacggactggcggtatttgacaaacgtgttgtactgttcggcg

SEQ ID NO: 31137 - DNA, 260 bp, Unknown
  Description of Unknown: RightRegion for integrase B5138 sequence
ccagacgaatctgaaagcggttcttgtagtatcgagtttggctcccccgactggacttgaaccagtgacaccctgattaacagtttgggtgttgaaaacgcactatacacattatacaaggttgatgagcatttgtcaatactgcttaccagaaaaggcagcaggaaccgtcaaattacgctttttatctcccaaaggtgtataataagtattgcgaaacagatttgttttgtaaatacaacatatgggagcaaaacatg

SEQ ID NO: 31138 - DNA, 260 bp, Unknown
  Description of Unknown: RightRegion for integrase B5139 sequence
aagaaaaaccagaaaaactctgaattcacaatcgatgtgtacccgaaagtgccgaaatgacggtgctttcggagcatatttattagttgcatcttctacgagcgtattcctccgtgccgatatccgtaagtgttgcggtcacctctttatatggcatggtgtaccgctgagataaataccgcatcgatgcagcgagctccccgtccgggccgccaaattgtgaaatgatcactttggcaatctgtgggttcgtttgtgta

SEQ ID NO: 31139 - DNA, 109 bp, Unknown
  Description of Unknown: RightRegion for integrase B5140 sequence
aagaaaaaccagaaaaactctgaattcacaatcgatgtgtacccgaaagtgccgaaataacggtgctttcggagtatattcattagctgcatcttttacgagcgtattc

SEQ ID NO: 31140 - DNA, 260 bp, Unknown
  Description of Unknown: RightRegion for integrase B5141 sequence
gaagtgttcggacgctgtgcgcaaagtcctgccaaaagccgtttatctcgtttgaggtaagcggctttttgttttttgctgcgtcgtaggggccgcatatatgcggcccgcgggttggcgggagcgacccgatcacggctggcatctggaatgctaaacaggcgcttacttacgatgtgccgaaaaaaagaggatgtggactgatccacatcctctaaaacaaaaacaaatccgaaacaacgcttcacaaagaagattga

SEQ ID NO: 31141 - DNA, 260 bp, Unknown
  Description of Unknown: RightRegion for integrase B5142 sequence
gaaataatagtaaatgaagaagatgtaatcgtttatttaaacatccctattacaaagtgaaatagcatataattcgtgtatgtcaaaaagtgatcacctcatctgcaccatagtgacatgcacagttaagagatagatttattctatctcttgtgtgtcatagttttatcaaagcaattcatatagatttgaatatcgctttcatttaccactattttttttactacaagatttatcaattcttttaatggagttgattc

SEQ ID NO: 31142 - DNA, 260 bp, Unknown
  Description of Unknown: RightRegion for integrase B5143 sequence
aagaaaaaccagaaaaactctgaattcacaatcgatgtgtacccgaaagtgccgaaataacggtgctttcggagtatatttattagctgcatcttttacgagcgtattcctccgtgcctgtatcgttatcgaaattgcacattttaaattgtcagaactttaatagcacaccacaacgtacatttttgtcaatccctttactgtaagcacttgaaaagtggggattgacaaaagaaaacacagtaaaatgagaaaaggga

SEQ ID NO: 31143 - DNA, 260 bp, Unknown
  Description of Unknown: RightRegion for integrase B5144 sequence
aaaaaggggcaggatcgttctgattttgaaattgatgtgtttccaaaagtgccgaaatagcggcgtttttcattcgttgcatcttctacgagcgaaagaactcgctcacatggaaatggtatgcgccatcgtttatcagctcaccaaggacctttctccggaggaaatcgaacgctccggatttgctccttattatgtagatcacacacttgccctctggccacaggcagcaagcggcgccccatggacagcaacttatt

SEQ ID NO: 31144 - DNA, 260 bp, Unknown
  Description of Unknown: RightRegion for integrase B5145 sequence
tggtccgccgagaacgacctctccgtcaccatccaccccaaaatttccgcccgcaaataacacccaacatcgcaagccgcgtgaagcggaactgctctgtgtttctattgatgttgagcggattcagtttaatcgaggtttctacagcgttgatatccgctttttctatcgcattgaatgtgaaatcagctgcgtaatcggtcgtccgcgtatcgtggacggactggcggtatttgacaaacgtgttgtactgttcggcg

SEQ ID NO: 31145 - DNA, 109 bp, Unknown
  Description of Unknown: RightRegion for integrase B5146 sequence
ttcgataaaatcacctgggacagtgcctcaaaggaactgcttttctttttacagatgtgatgttaattaatctggtcagtacctcctgaccacccccactcgtaagtca

SEQ ID NO: 31146 - DNA, 260 bp, Unknown
  Description of Unknown: RightRegion for integrase B5147 sequence
tatcacagcgtcaggatactgccactcaaaggcggctttggtgtgctgctcgcggcctaatagttgctgccaggcgtgctcgcggcgccgtcatcagggtagcggaaagaattttgcccaaaaaaaatgcccaccccggtagagccggagtgggcgaagcgctatttgcgattgatgaagaggcacatggcgagcacgccgacagctgcccccagctgtgcgcctaaaagtaccatgaggatgttgcctaacatataagc

SEQ ID NO: 31147 - DNA, 260 bp, Unknown
  Description of Unknown: RightRegion for integrase B5148 sequence
aagaaaaaccagaaaaactctgaattcacaatcgatgtgtacccgaaagtgccgaaatgacggtgctttcggagcatatttattagttgcatcttctacgagcgtattctttcgcacatccaagatgcaactaatccacattaaataagtaatacctttttgataaaaataagattgatacaatattcacccctcagagagctaatctccgagggggttttattaaatagatttaaccggttcacgatacaatgggttca

SEQ ID NO: 31148 - DNA, 109 bp, Unknown
  Description of Unknown: RightRegion for integrase B5149 sequence
gcctgttcggatttatcatcaaatgccctgccactgaggttttcaagattttggtcttgaaaacctcttttttactgtcaaatacttcaaataatgcactttctggtat

SEQ ID NO: 31149 - DNA, 109 bp, Unknown
  Description of Unknown: RightRegion for integrase B5150 sequence
aagaaaaaccagaaaaactctgaattcacaatcgatgtgtacccgaaagtgccgaaataacggtgctttcggagtatatttattagctgcatcttttacgagcgtattc

SEQ ID NO: 31150 - DNA, 260 bp, Unknown
  Description of Unknown: RightRegion for integrase B5151 sequence
cccttgctattgctctatgttcctctccccgcgggcatatttcgccatagaggtgcctagcgttcattctaaggcgttttcgagtgttcgccctcaaaactataccctaaaatttaaaccgcgtcagaatcgattctaggggcattctgagcgatttgctctgtattgtgaatattgtacaaatcataagcttgtattttgtgcatgtatacaaaagtgttcccattgtcataaaacgcttgacaaatgttcccgaatgg

SEQ ID NO: 31151 - DNA, 241 bp, Unknown
  Description of Unknown: RightRegion for integrase B5152 sequence
gatatacattggagcttttccccggaagccgccgaggttatcccggggcgctccgcataaaaaataaaggccgtccgtgctgggcggccttttcgcttaaattgctgaatcgctgaatttacgcgcacttttcgctgacttttcgcaaaatgcgcgaataacgcgattttgttggcgccgacaaaatcggcaggttatttgtctactctgatataactactgcaaacctccacatgcttcg

SEQ ID NO: 31152 - DNA, 260 bp, Unknown
  Description of Unknown: RightRegion for integrase B5153 sequence
aaaaaggggcaggatcgttctgattttgaaattgatgtgtttccaaaagtgccgaaatagcggcgtttttcattcgttgcatcttctacgagcgaaagaactcgctcgtagaagatgaagctaattaaataatgataagatgatgcaatatttctccccggagctgatactccggggaatatttttaatataactggaatttatcaagcgcaatgccgaaacatccggcatatccgtcctgcccgtttcctacttcattg

SEQ ID NO: 31153 - DNA, 260 bp, Unknown
  Description of Unknown: RightRegion for integrase B5154 sequence
gcagaggaattggctgttagcagtgttcgattaagctccgcaagcagccaccaagcataataaaaggatagctgatggctatccttttgtgtttctggtaaagagcagaggggatttgaagggaacggcccggcagggtaaaaaggcatccggtggatggctttttagttccccgggctggcggcaagactgccccagtcttgccgggaatcccctatgctccactattaaaaaacgcctgaatctataaggattcgggc

SEQ ID NO: 31154 - DNA, 260 bp, Unknown; identical to SEQ ID NO: 31132
  Description of Unknown: RightRegion for integrase B5155 sequence

SEQ ID NO: 31155 - DNA, 260 bp, Unknown
  Description of Unknown: RightRegion for integrase B5156 sequence
gaagccctctccgatgcagaggataggtgttcgactttccaacgatacccgcagtcctgacaaaccgcatagctttttacctttgatcctttacgtatcagcaacggaatcagaattatcaatccacaagttaagagagtaagtattatccacagtatagacgcgaggcatcctcttttcttctgctccgctaccgcttgcaccgtaacattttcgctgccgcatttcttacataccattgtcatttcctcccgttttcc

SEQ ID NO: 31156 - DNA, 109 bp, Unknown; identical to SEQ ID NO: 31149
  Description of Unknown: RightRegion for integrase B5157 sequence

SEQ ID NO: 31157 - DNA, 260 bp, Unknown
  Description of Unknown: RightRegion for integrase B5158 sequence
aaaaaggagcaggatcgttctgattttgaaattgatgtgtttccaaaagtgccgaaatagcggcgtttttcattcgttgcatcttctacgagcgaaagaactcgctcacatggaaatggtatgcgccatcgtttatcagctcaccaaggacctttctccggaggaaatcgaacgctccggatttgctccttattatgtagatcacacacttgctctctggccacaggcagcaagcggcgccccatggacagcaacttatt

SEQ ID NO: 31158 - DNA, 260 bp, Unknown
  Description of Unknown: RightRegion for integrase B5159 sequence
cactgtgtgtatgataaggttaatgataacttggagatatatttttttctgcaaagataactaaaaggtgaggttattttattcctcaccttcttgattacttttttctattatatcccatgtcttaatagcctctttaataaattgataaaaatacattaatacaacaattcctaacaatacaacacttattattaatgtaacaatattactatgattttccttaaaaactgctattaagtctgttatttgattaactg

SEQ ID NO: 31159 - DNA, 260 bp, Unknown
  Description of Unknown: RightRegion for integrase B5160 sequence
aaaaagaaccagaaaaactctgaatttatgattgatgtgtacccgaaagtaccgaaataatggtgctttcggattctattcattagttgcatcttctacgagcgtattcctccgtgccgatatccgtaagtgttgctgtcacctctttatatggcatggtgtaccgctgagataaataccgcattgatgcagcgagctccccgtccgggccaccaaattgtgaaatgatcactttggcaatctgtgggttcgtttgtgta

SEQ ID NO: 31160 - DNA, 260 bp, Unknown; identical to SEQ ID NO: 31128
  Description of Unknown: RightRegion for integrase B5161 sequence

SEQ ID NO: 31161 - DNA, 109 bp, Unknown
  Description of Unknown: RightRegion for integrase B5162 sequence
gaagtgttcggacgctgtgcgcaaagtcctgccaaaagccgcttatctcgtttgaggtaagcggctttttttgcgttgtaggggccgggcatgttcggcccgcgggttg

SEQ ID NO: 31162 - DNA, 260 bp, Unknown; identical to SEQ ID NO: 31132
  Description of Unknown: RightRegion for integrase B5163 sequence

SEQ ID NO: 31163 - DNA, 260 bp, Unknown
  Description of Unknown: RightRegion for integrase B5164 sequence
aatgttgctttcttatctatttcactcataagtcctaatttatcctctcaatcggcttagaagtgccttcagtagtggctttaagctcttctgcctttacggcattgactttgacgtcagcgccttttaatttggcaatctgagcctcaagcttctttacctcagcgtcctgctttgccttaagctcttcctgctttttggcaagtttgtcagctctaagcttagatttgatagcttctttttctgcttttgccttatca

SEQ ID NO: 31164 - DNA, 260 bp, Unknown
  Description of Unknown: RightRegion for integrase B5165 sequence
ggacgttggaataaggaagcacaagataatttttctattgaattagaactgaatctttaacatacatcataaatgttctaaagaaatggctcatgtagagatgatagctactatggctaatcaactaatggaaaatgcttctatagatgaaattaaagctgcaggcttagatgggcactatgttgaccatggaaaagctttattctatacagatgctacaggcaacccttggactgcaacttatatacaagctaaaggtg

SEQ ID NO: 31165 - DNA, 260 bp, Unknown
  Description of Unknown: RightRegion for integrase B5166 sequence
cacatcagcgctacgcgaacactatatcttgtttatagcgttccgtttaccgcaaaataagaaaaaccgaggctaaagcctcggttttttgtttatttcagcgcattctccgcgccgacgggattgctcttcatccactcattcattctcgccacaacctcatcaatgagccgtgacaacgactcctcggagatcagccacgtcagccacttgtatctggcgtacagccacgcgatgacctgctgcttcttgagctgtcc

SEQ ID NO: 31166 - DNA, 260 bp, Unknown
  Description of Unknown: RightRegion for integrase B5167 sequence
gatgtgttcggacgctgtgcgcaaagtcctgccaaaagccgcttatctcgtttgaggtaagcggctttttgtttttttgcgttgtaggggccgggcatgcccggcccgcgggttggcgggagagacccgaccacggctggcatctaggattctaaacaggcgtttacttacaatgcgccgaaaaaagaggatgtggactgatccacatcctctgaaacaaaaacaaatccgaaacaatgcttcacaaagaagattgagtt

SEQ ID NO: 31167 - DNA, 260 bp, Unknown
  Description of Unknown: RightRegion for integrase B5168 sequence
tggtccgccgagaacgacctctccgtcaccatccaccccaaaatctccgcccgcaaataacacccaacatcgcaagtcgcgtgaacccgcctttccatcttctgtgtaacaaaaaaggccgcctcccggcggcctttccctcacttccccagttttcctgcaatctttccgatctcctccagtgcaaaccgtaactgttcattctcctcctgcacctccgcaggcagcagcggcacctctgccgcagcaggcagcgccat

SEQ ID NO: 31168 - DNA, 260 bp, Unknown
  Description of Unknown: RightRegion for integrase B5169 sequence
aagaaaaaccagaaaaactctgaattcacaatcgatgtgtacccgaaagtgccgaaatgacggtgctttcggagcatatttattagttgcatcttctacgagcgtattcctccgtgccgatatccgtaagtgttgctgtcacctctttatatggcatggtgtaccgctgagataaataccgcatcgatgcagcgagctccccgtccgggccaccaaatagcaataacctataatatttttacatattataaatatacacg

SEQ ID NO: 31169 - DNA, 260 bp, Unknown; identical to SEQ ID NO: 31132
  Description of Unknown: RightRegion for integrase B5170 sequence

SEQ ID NO: 31170 - DNA, 260 bp, Unknown
  Description of Unknown: RightRegion for integrase B5171 sequence
gcagaggaattggctgttagcagtgttcgattaagctccgcaagcagccaccaagcataataaaaggatagctgatggctatccttttgtgtttctggtaaagagcagagggaatttgaagggaacggcccggcagggtaaaaaggcatccggtggatggctttttagttccccgggctggcggcaagactgccccagtcttgccgggaatcccctatgctccaccaagcataatacaaggatagctgatcttaatggtt

SEQ ID NO: 31171 - DNA, 260 bp, Unknown
  Description of Unknown: RightRegion for integrase B5172 sequence
aagaaaaaccagaaaaactctgaattcacaatcgatgtgtacccgaaagtgccgaaataacggtgctttcggagtatatttattagctgcatcttttacgagcgtattcctccgtgccgatatccgtaagtgttgcggtcacctctttatatggcatggtataccgctgagataaataccgcattgatgcagcgagctccccgtccggtccaccaaattgtgaaatgatcactttggcaatctgtgggttcgtttgtgta

SEQ ID NO: 31172 - DNA, 260 bp, Unknown
  Description of Unknown: RightRegion for integrase B5173 sequence
tgtattgatttgggaagaaataaaggggggaaaccaatattagatatttttttaaaataaatctacatcatgatggtgatgtcaatgtagcccatcaagaaattgatttaaagaatcctaaaacgaatcgtaaaaatgcaggtttttctgatgaagagagagctaagatgacaaatttattagaaaatggttttatagatacgtatcgatatttatatcctgatcaagaaggtgtttattcttggtggtcatatcgattt

SEQ ID NO: 31173 - DNA, 260 bp, Unknown
  Description of Unknown: RightRegion for integrase B5174 sequence
ggacgttggaataaagaagcacaagataatttttctattgaattagaactgaatctttaacatacatcataaatgttctaaagaaatggctcatgtagagatgatagctactatggctaatcaactaatggaaaatgcttctatagatgaaattaaagctgcaggcttagatgggcactatgttgaccatggaaaagctttattctatacagatgctacaggcaacccttggactgcaacttatatacaagctaaaggtg

SEQ ID NO: 31174 - DNA, 260 bp, Unknown
  Description of Unknown: RightRegion for integrase B5175 sequence
ggcgaacccttttcggggttcgcctttttttgtttgggttggaagtcatcgccccagtagtcgaaagcgaaataaagcttgagttcatccccgtctacttcaatgagccgcacgaacgtctcgatgatttcggctgcatctggttcctgcgcaatgtgatcgagccaagcggctatggcttcaccagacagattcgccccttcgttggcttgagcttgccgcaaatcggcttctaatgccgctttctgctcacggagcat

SEQ ID NO: 31175 - DNA, 260 bp, Unknown
  Description of Unknown: RightRegion for integrase B5176 sequence
gaagtgttcggacgctgtgcgcaaagtcctgccaaaagccgcttatctcgtttgaggtaagcggctttttgtttttgctgcgttgtaggggccgcatatatacggcccgcgggttggcgggagagacccgaccacggctggcatctggaatgctaaacaggcgcttacttacgatgtgccgaaaaaagaggatgtggactgatccacatcctctgaaacaaaaacaaatccgaaacaatacttcacaaagaagattgagt

SEQ ID NO: 31176 - DNA, 260 bp, Unknown
  Description of Unknown: RightRegion for integrase B5177 sequence
gaagtgttcggacgctgtgcgcaaagtcctgccaaaagccgcttatctcgtttgaggtaagcggccttttgttttttgctgcgtcgcaggggccgcatatatgcggcccgcgggttggcgggagcgacccgaccacggctggcatctggaatgctaaacaggcgtttacttacgatgcgccgaaaaaagaggatgtggactgatccacatcctctaaaacaaaaacaaatccgaaacaatgcttcacaaagaagattgag

SEQ ID NO: 31177 - DNA, 260 bp, Unknown
  Description of Unknown: RightRegion for integrase B5178 sequence
gcagaggaattggctgttagcagtgttcgattaagctccgcaagcagccaccatacttgagaaatccgaacttgattccgatagggaatgggttcggatttcttgtttttatcaaggacattgaagtttagtttcgggatagaataacatcaaattcaggaggatatacccatggaaaagctcataagctgtgcgttcaatatagataccgcctgcgtggaacttcactttacggatgggagtatttactccataaattg

SEQ ID NO: 31178 - DNA, 260 bp, Unknown
  Description of Unknown: RightRegion for integrase B5179 sequence
gaagtgttcggacgctgtgcgcaaagtcctgccaaaagccgcttatctcgtttgaggtaagcggctttttgtttttttgcgttgtaggggccgggcatgcccggcccgcgggttggcgggagagacccgaccacggctggcatctaggattctaaacaggcgtttacttacaatgcgccgaaaaaagaggatgtggactgatccacatcctctgaaacaaaaacaaatccgaaacaatgcttcacaaagaagattgagtt

SEQ ID NO: 31179 - DNA, 260 bp, Unknown
  Description of Unknown: RightRegion for integrase B5180 sequence
gatatacattggagctttgtcccggaagccgccgaggttatcccggggcgctccgcataaaaataaggccgcccgtactgggcggcctttgtgcttagattgcgaaatcgctgaatttacgcgcacttttcgctgacttttcgcaaaatgcgcgaataacgcgattttgttggcgccgacaaaatcggcaggttatttgtctactctgatataactactgcaaacctccacatgcctcgtcctcgggaaaaggtccaccg

SEQ ID NO: 31180 - DNA, 260 bp, Unknown
  Description of Unknown: RightRegion for integrase B5181 sequence
taccgcaacgaaaacccctcgaagtacctgtccattacggtatatccaattcttgattgattttatttttaggtaaaataaggatatgatgcgtgtcttgattcatcaagacacgcatcatatccttattattttgctacttccagccatcgatcatcgccttgacttcagcggtcttggcgatgaggtcgttgtggatggcttcccacgcggtgatcatgccgtcgacgtaggcggggttgcgcttgtactcctcggat

SEQ ID NO: 31181 - DNA, 260 bp, Unknown
  Description of Unknown: RightRegion for integrase B5182 sequence
gatgtgttcggacgctgtgcgcaaagtcctgccaaaagccgcttatctcgtttgaggtaagcggctttttgttttttgctgcgtcgtaggggccgcatatatgcggcccgcgggttggcgggagagacccgaccacggctggcatctggaatgctaaacaggcgtttacttacgatgcaccgaaaaaagaggatgtggacagatccacatcctctaaaacaaaaacaaatccgaaacaatacttcacaaagaagattgag

SEQ ID NO: 31182 - DNA, 260 bp, Unknown
  Description of Unknown: RightRegion for integrase B5183 sequence
gcagaggaattggctgttagcagtgttcgattaagctccgcaagcagccaccaagcataataaaaggatagctgatggctatccttttgtgtttctggtaaagagcagaggggatttgaagggaacggcccggcagggtaaaaaggcatccggtggatggctttttagttccccgggctggcggcaagactgccccagtcttgccgggaatcccctatgctccaccaagcataataaaaggatagctgatcttaatggtt

SEQ ID NO: 31183 - DNA, 260 bp, Unknown
  Description of Unknown: RightRegion for integrase B5184 sequence
gaagtgttcggacgctgtgcgcaaagtcctgccaaaagctgcttatctcgtttgaggtaagcggctttttattttttgctgcatcgtagggctcgggcatgcccggcccgcgggttggcgggaacgacccgaccacggctggcatctggaatgctaaacaggcgcttacttacgatgcgccgaaaaaagaggatgtggactgatccacatcctctaaaacaaaaacaaatccgaaacaatgcttcacaaagaagattgag

SEQ ID NO: 31184 - DNA, 260 bp, Unknown
  Description of Unknown: RightRegion for integrase B5185 sequence
taccgcaacgaaaacccctcgaagtacctgtccattacggtatatccaattcttgattgattttatttttagataaaataaggatatgatgcgtgtcttgatgaatcaagacacgcatcatatccttattattttgctacttccagccatcgatcatcgccttgacctctgcggtcttggcgatgaggtcgttgtggatggcttcccacgcgacgatcatgccgtcggcgtaagatgggttgcgcttgtactcctcggag

SEQ ID NO: 31185 - DNA, 109 bp, Unknown
  Description of Unknown: RightRegion for integrase B5186 sequence
aagaaaaaccagaaaaactctgaattcacaatcgatgtgtacccgaaagtgccgaaatgacggtgctttcggagcatatttattagttgcatcttctacgagcgtattc

SEQ ID NO: 31186 - DNA, 90 bp, Unknown
  Description of Unknown: RightRegion for integrase B5187 sequence
tcgacctttaacaccttaactccaccaaataagttaaaggggactttgtcaataatttgatataaaaaaagtaaaaaagagggggatatt

SEQ ID NO: 31187 - DNA, 260 bp, Unknown
  Description of Unknown: RightRegion for integrase B5188 sequence
gatgtgttcggacgctgtgcgcaaagtcctgccaaaagccgcttatctcgtttgaggtaagcggctttttgttttttgctgcgtcgtagggggccgcatatatacggcccgcgggttggcgggagcgacccgaccacggctggcatctggaatgctaaacaggcgtttacttacgatgcgccgaaaaaaagatgtggactgatccacatcctctaaaacaaaaacaaatccgaaacaatgcttcacgaagaagattgagt

SEQ ID NO: 31188 - DNA, 109 bp, Unknown
  Description of Unknown: RightRegion for integrase B5189 sequence
gagttcagcagagaatgtaattccgagttcatcctggatgtattcctgaaagaagattagaggtctatatccaactctaccgggcaatgatcggaacccatgattcctg

SEQ ID NO: 31189 - DNA, 260 bp, Unknown; identical to SEQ ID NO: 31152
  Description of Unknown: RightRegion for integrase B5190 sequence

SEQ ID NO: 31190 - DNA, 260 bp, Unknown
  Description of Unknown: RightRegion for integrase B5191 sequence
gaagtgttcggacgctgtgcgcaaagtcctgccaaaagccgcttatctcgtttgaggtaagcggctttttgttttttgctgcgtcgtaggggccgggcatgtgcggcccgcgggttggcgggagagacccgaccacggctggcatccggaatgctaaacaggcgcttacttacgatgtgccgaaaaaagaggatgtggactgatccacatcctctaaaacaaaaacaaatccgaaacaatgcttcacaaagaagattgag

SEQ ID NO: 31191 - DNA, 260 bp, Unknown
  Description of Unknown: RightRegion for integrase B5192 sequence
aagaaaaaccagaaaaactctgaattcacaatcgatgtgtacccgaaagtgccgaaataacggtgctttcggagtatatttattagctgcatcttttacgagcgtattcctccgtgccgatatccgtaagtgttgcggtcacctctttatatggcatggtgtaccgctgagataaataccgcatcgatgcagcgagctccccgtccgggccaccaaattgtgaaatgatcactttggcaatctgtgggttcgtttgtgta

SEQ ID NO: 31192 - DNA, 84 bp, Unknown
  Description of Unknown: RightRegion for integrase B5193 sequence
tggtccgacgagaatgacctctccgtcaccatccaccccaaaatttccgcccgcaaataacacctaacatcgcaatccgcgtga

SEQ ID NO: 31193 - DNA, 260 bp, Unknown
  Description of Unknown: RightRegion for integrase B5194 sequence
aaaaaggggcaggatcgttctgactttgaaattgatgtgtttccaaaagtgccgaaatagcggcgtttttcgttcgttgcatcttctacgagcgaaagaactcgcccatagaagatgaagctaattaaataatgataagatgatgcaatatttcaccccggagctgatcctccggggaatgtttttagtatagttgaaatttgtcaaacgcaacgccgaaacatccggcatgtccgtcctgcccgtttcctacttcattg

SEQ ID NO: 31194 - DNA, 109 bp, Unknown
  Description of Unknown: RightRegion for integrase B5195 sequence
aagaaaaaccagaaaaactctgaatttacaatcgatgtgtacccgaaagtgccgaaataacggtgctttcggagtatattcattagctgcatcttttacgagcatattc

SEQ ID NO: 31195 - DNA, 109 bp, Unknown
  Description of Unknown: RightRegion for integrase B5196 sequence
aaaaagaaccagaaaaactctgaatttatgattgatgtgtacccgaaagtaccgaaataatggtgctttcggattctattcattagttgcatcttctacgagcgtattc

SEQ ID NO: 31196 - DNA, 260 bp, Unknown
  Description of Unknown: RightRegion for integrase B5197 sequence
gagttcagcagagaatgtaattccgagttcatcctggatgtattcctgaaagaagattagaggtctatatccagttctaccgggcaatgatcggaacccatgattcctgtatggattctggcatcctggatcttgtcctgcacaaaatcggaagtcaggaaatagtctattctccatccagcatttcgttccctggctttaaagcgatatgaccaccaggagtattctatctgatctggatacagatagcgatatgtgtc

SEQ ID NO: 31197 - DNA, 260 bp, Unknown
  Description of Unknown: RightRegion for integrase B5198 sequence
aagaaaaaccagaaaaactctgaattcacaatcgacgtgtacccgaaagtgccgaaatgacggtgctttcggagcatatttattagttgcatcttctacgagcgtattcctccgtgccgatatccgtaagtgttgcggtcacctctttatatggcatggtataccgctgagataaataccgcattgatgcagcgagctccccgtccggtccaccaaattgtgaaatgatcactttggcaatctgtgggttcgtttgtgta

SEQ ID NO: 31198 - DNA, 260 bp, Unknown
  Description of Unknown: RightRegion for integrase B5199 sequence
gatgtgttcggacgctgtgcgcaaagtcctgccaaaagccgcttatctcatttgaggtaagcggctttttgttttttgctgcgtcgtaggggccgcatatatgcggccagcaggtttgcggcagtaacccgttgacgtgtgattgctttcgcgctgcgggccggcatgtgcggccccctgttgatgcgttgactatatataaccaacaaaaaagccgaatccgtgaggactcggcttttgctgtttctgacagccatctt

SEQ ID NO: 31199 - DNA, 260 bp, Unknown
  Description of Unknown: RightRegion for integrase B5200 sequence
aagaaaaaccagaaaaactctgaattcacaatcgatgtgtacccgaaagtgccgaaataacggtgctttcagagtatattcattagctgcatcttttacgagcgtattcctccgtgccgatatccgtaagtgttgctgtcacctctttatatggcatggtgtaccgctgagataaataccgcatcgatgcagcgagctccccgtccgggccgccaaattgtgaaatgatcactttggcaatctgtgggttcgtttgtgta

SEQ ID NO: 31200 - DNA, 260 bp, Unknown
  Description of Unknown: RightRegion for integrase B5201 sequence
gaacatttagcatttgttaaaaataaattagttctatttttctatatacctaaattttaaaattaaagcagctatccatgatagttgctttttttgttttttattgcttaataaaatttttatttaccataaaattactagctaaaaataagcaaagctcctctaaagcttaaaaattaaacctttttttagtctccaaaaaattctatcatcgttagtaaaaaaatttaaaattcttgtatattaatacttttaatagt

SEQ ID NO: 31201 - DNA, 260 bp, Unknown
  Description of Unknown: RightRegion for integrase B5202 sequence
acttccaatgcaccagcattagcgatccgaccacgtagcatcaaaacagccagctcctgatccgcttccagtgtcgtcaactgtatactgtcctctttgatgcggcatctgtctaatttcagtaaagtcacatcccggtaaataccggcaccgaaattttcccagtaagtgctgctttttacgtttacctgtttttattcaaacattaatcactttttattatttctataaagatccgtgacatctttatattatttttc

SEQ ID NO: 31202 - DNA, 260 bp, Unknown
  Description of Unknown: RightRegion for integrase B5203 sequence
gagttcagcagagaatgtaattccgagttcatcctggatgtattcctgaaagaagattagaggtctatatccaactctaccgggcaatgatcggaacccatgattcctgtatggattctggcattctggatcttgtcctgtgcaaaatcagaagtcaggaaatagtctattctccatccggcatttcgttcccttgctttaaagcgatacgaccaccaggagtattcaatttgatctggatgcagatagcgatatgtgtc

SEQ ID NO: 31203 - DNA, 260 bp, Unknown
  Description of Unknown: RightRegion for integrase B5204 sequence
aagaaaaaccagaaaaactctgaatttacaatcgatgtgtacccgaaagtgccgaaataacggtgctttcggagtatattcattagctgcatcttttacgagcatattcctccgtgccgatatccgtaagtgttgcggtcacctctttatatggcatggtataccgctgagataaataccgcattgatgcagcgagctccccgtccggtccaccaaattgtgaaatgatcactttggcaatctgtgggttcgtttgtgta

SEQ ID NO: 31204 - DNA, 260 bp, Unknown
  Description of Unknown: RightRegion for integrase B5205 sequence
gaagtgttcggacgctgtgcgcaaagtcctgccaaaagccgcttatctcgtttgaggtaagcggcttttttttgctgcgtcgtaggggccgcatatatgcggcccgcgggttggcgggagagacccgaccacggctggcatctggaatgctaaacaggcgtttacttacgatgcgccgaaaaaagaggatgtggactgatccacatcctctgaaacaaaaacaaatccgaaacaacgcttcacaaagaagattgagttcg

SEQ ID NO: 31205 - DNA, 260 bp, Unknown
  Description of Unknown: RightRegion for integrase B5206 sequence
gaagtgttcggacgctgtgcgcaaagtcctgccaaaagccgcttatctcgtttgaggtaagcggttttttgttttttgctgcgttgtaggggccgggcacgcccggcccgcgggttggcgggagagccccgaccacggctggcatctggaatgctaaacaggcgtttacttacgatgtgctgaaaaaagaggatgtggactgatccacatcctctaaaacaaaaacaaatccgaaacaatgcttcacaaagaagattgag

SEQ ID NO: 31206 - DNA, 260 bp, Unknown
  Description of Unknown: RightRegion for integrase B5207 sequence
atcaacttgggcgaacatgccatctaccccactccgtggggcttcgcaatcgccgcatagaaacgcgaaaaacgccccgccgcatctccgcgacggggcaccgagaccaaggagcaacccatgaccatccccgagataaccgaggcccttgagggcgcagccgccgtccttaccgacatgtccgcagagcatccagaccccaggctcgcgctcgtgatcgccgcgctcggggcctgcgcggaatcgctcgaccgcttgtg

SEQ ID NO: 31207 - DNA, 260 bp, Unknown
  Description of Unknown: RightRegion for integrase B5208 sequence
gaagtgttcggacgctgtgcgcaaagtcctgccaaaagccgcttatctcgtttgaggtaagcggctttttgttttttgctgcgtcgtaggggccgggcatgtgcggcccgcgggttggcgggagagacccgaccacggctggcatctggaatgctaaacaggcgcttacttgcgatgcgccgaaaaaagagggtgtggactgatccacatcctctaaaacaaaaacaaatccgaaacaatgcttcacaaagaagattgag

SEQ ID NO: 31208 - DNA, 260 bp, Unknown
  Description of Unknown: RightRegion for integrase B5209 sequence
aagaagaatcagaaaaactccgaattcactattgacgtttacccgaaagtaccgaaataatggtgctttcggattctattcattagttgcatcttctacgagcgtattcctccgtgccgatatccgtaagtgttgctgtcacctctttatatggcatggtgtaccgctgagataaataccgcatcgatgcagcgagctccccgtccgggccgccaaattgtgaaatgatcactttggcaatctgtgggttcgtttgtgta

SEQ ID NO: 31209 - DNA, 260 bp, Unknown
  Description of Unknown: RightRegion for integrase B5210 sequence
gagttcagcagagaatgtaattccgagttcatcctggatgtattcctgaaagaagattagaggtctatatccagttctaccgggcaatgatcggaacccatgattcctgtatggatcctggcatcccggatcttgtcctgcacaaaatcggaagtcaggaaatagtctattctccatccggcatttcgttccctggctttaaagcgatatgaccaccaggagtactcgatctgatccggatgcagatagcggtacgtgtc

SEQ ID NO: 31210 - DNA, 67 bp, Unknown
  Description of Unknown: RightRegion for integrase B5211 sequence
acttccaatgcaccagcatacggtcttccgacaatgcacctgtgccgaagaactgcttgatcagggt

SEQ ID NO: 31211 - DNA, 260 bp, Unknown; identical to SEQ ID NO: 31132
  Description of Unknown: RightRegion for integrase B5212 sequence

SEQ ID NO: 31212 - DNA, 260 bp, Unknown; identical to SEQ ID NO: 31143
  Description of Unknown: RightRegion for integrase B5213 sequence

SEQ ID NO: 31213 - DNA, 260 bp, Unknown
  Description of Unknown: RightRegion for integrase B5214 sequence
gatgtgttcggacgctgtgcgcaaagtcctgccaaaagccgcttatctcgtttgaggtaagcggctttttgttttttgttgcgttgtagggaccgggcatgtgcggcccgcgggtttgcgggagcgacccaaccacggctggcatctggaatgctaaacaggcgcttacttacgatgcgccgaaaaaagaggatgtggactgatccacatcctctaaaacaaaaacaaatccgaaacaatgctccacaaagaagattgag

SEQ ID NO: 31214 - DNA, 260 bp, Unknown
  Description of Unknown: RightRegion for integrase B5215 sequence
ggacgttggaataaggaagcacaagataatttttctattgaattagaactgaatctttaacatacatcataaatgttctaaagaaatggctcatgtagagatgataggaacaatggcatatcaacttatggaaaacgcttctatagatgaactaaaaaaagctggactagatggacactatgtagatcatggtaaagctttattctatacagatgctacaggcaacccttggactgcaacttatattcaagcaaaaggcg

SEQ ID NO: 31215 - DNA, 260 bp, Unknown
  Description of Unknown: RightRegion for integrase B5216 sequence
ccagacgaatctgaaagcggttcttgtaatattagatttggctcccccgactggacttgaaccagtgacaccctgattaacagtttcccaagggcacaagggcatacaaaaaggatcatgaatcccgcttgtatgctcttgtgccctttttttgttttatctatctatcaatcactttggagcgcagcgggcgaatgctcgaaaacgcacacgcgtgttcgaaactttgttggaaactcgccgggttgagtaattttcac

SEQ ID NO: 31216 - DNA, 147 bp, Unknown
  Description of Unknown: RightRegion for integrase B5217 sequence
aaaaaaagactttcaaagttcaacatcaaaatatatccaagacttagatataataaataagttataactattatcatcaaactgataaccaatttaacgtcatgagtggtgcatttgctggaggtgaaggagattacgttgcgttat

SEQ ID NO: 31217 - DNA, 260 bp, Unknown
  Description of Unknown: RightRegion for integrase B5218 sequence
aagaaaaaccagaaaaactctgaattcacaatcgatgtgtacccgaaagtgccgaaataacggtgctttcggagtatatttatcagctgcatcttttacgagcgtattcctccgtgccgatatccgtaagtgttgctgtcacctctttatatggcatggtataccgctgagataaataccgcatcgatgcagcgagctccccgtccgggccgccaaattgtgaaatgatcactttggcaatctgtgggttcgtttgtgta

SEQ ID NO: 31218 - DNA, 260 bp, Unknown
  Description of Unknown: RightRegion for integrase B5219 sequence
aagaaaaaccagaaaaactctgaattcacaatcgatgtgtacccgaaagtgccgaaataacggtgctttcggagcatatttattagttgcatcttctacgagcgtattcctccgtgccgatatccgtaagtgttgctgtcacctctttatatggcatggtgtaccgctgagataaataccgcattgatgcagcgagctccccgtccgggccaccaaattgtgaaatgatcactttggcaatctgtgggttcgtttgtgta

SEQ ID NO: 31219 - DNA, 260 bp, Unknown
  Description of Unknown: RightRegion for integrase B5220 sequence
aaaaaagggcagaaacaatccgaattttcaatagacgtatatccgaaagtgccgaaataacggcgcttttcaggtgtttctcgttagttgcatcttctacgttcccattcttccgtaccaatatcagtcaatgtagcggtcacttctttatacggcatcgtatagcgctgtgccaaatatcgcatcgatgccgccagctcaccgtccggtcctccaaactgcgtaatgataatctgtgcaattttaggattcgtctgtgt

SEQ ID NO: 31220 - DNA, 161 bp, Unknown
  Description of Unknown: RightRegion for integrase B5221 sequence
aagaaaaaccagaaaaactctgaattcacaatcgatgtgtacccgaaagtgccgaaataacggtgctttcggagtatatttattagctgcatcttttacgagcgtattctttcgcacatctaagatgcaactaatacacattaaataagtagtaacttttt

SEQ ID NO: 31221 - DNA, 109 bp, Unknown; identical to SEQ ID NO: 31149
  Description of Unknown: RightRegion for integrase B5222 sequence

SEQ ID NO: 31222 - DNA, 260 bp, Unknown
  Description of Unknown: RightRegion for integrase B5223 sequence
aagaaaaaccagaaaaactctgaattcacaatcgatgtgtacccgaaagtgccgaaataacggtgctttcggagtatatttattagctgcatcttttacgagcgtattcctccgtgccgatatccgtaagtgttgcggtcacctctttatatggcatggtataccgctgagataaataccgcattgatgcagcgagctccccgtccggtccgccaaattgtgaaatgatcactttggcaatctgtgggttcgtttgtgta

SEQ ID NO: 31223 - DNA, 260 bp, Unknown
  Description of Unknown: RightRegion for integrase B5224 sequence
aagaaaaaccagaaaaactctgaattcacaatcgatgtgtacccgaaagtgccgaaataacggtgctttcggagtatattcattagctgcatcttttacgagcgtattcctccgtgccgatatccgtaagtgttgctgtcacctctttatatggcatggtgtaccgctgagataaataccgcatcgatgcagcgagctccccgtccgggccgccaaattgtgaaatgatcactttggcaatctgtgggttcgtttgtgta

SEQ ID NO: 31224 - DNA, 106 bp, Unknown
  Description of Unknown: RightRegion for integrase B5225 sequence
ggcctggatggcttcgacgacaaagaaaaaccggacggtttacttccgcgtcacaggtagggtgttaaaaatccagataattcaaggttggaaaagaggcgacagc

SEQ ID NO: 31225 - DNA, 101 bp, Unknown
  Description of Unknown: RightRegion for integrase B5226 sequence
accaaaatgatgacgggaaatcctgggtgttcgcgttgcgaacgtttggtgacccggtagggattcgaaccctagacctactgattcgtagtcagtcactc

SEQ ID NO: 31226 - DNA, 260 bp, Unknown; identical to SEQ ID NO: 31128
  Description of Unknown: RightRegion for integrase B5227 sequence

SEQ ID NO: 31227 - DNA, 260 bp, Unknown
  Description of Unknown: RightRegion for integrase B5228 sequence
gaagtgttcggacgctgtgcgcaaagtcctgccaaaagccgcttatctcgtttgaggtaagcggcttttttgttgcgttgtaggggccgcatatatgcgacccgcgggttggcgggagagacccgaccacggctggcatctggaatgctaaacaggcgcttacttacgatgcgccgaaaaaagaggatgtggactgatccacatcctctaaaacaaaaacaaatccgaaacaatgcttcacaaagaagattgagttcgga

SEQ ID NO: 31228 - DNA, 260 bp, Unknown
  Description of Unknown: RightRegion for integrase B5229 sequence
aagaaaaaccagaaaaactctgaattcacaatcgatgtgtacccgaaagtgccgaaataacggtgctttcggagtatatttattagctgcatcttttacgagcgtattctttcgcacatccaagatgcaactaatccacattaaataagtagtaacttttttgacaaaaataagattgatacaatattcaggacggcaactccatccgtccaacactcatatacgccgcccgtaaaaaggtgtgcatcatttcggttgtc

SEQ ID NO: 31229 - DNA, 260 bp, Unknown
  Description of Unknown: RightRegion for integrase B5230 sequence
cccttactattgctctatgttcctctccccgcgggcatatttcgccatagaggtgcctagcgttcgttctaagggactttcgagcattcaccctcaaaactataccctaaaatttaaaacgccttagaattgattctagtggcattctgagcgatttgctctgtattgtgaatattgtacaaatcataagcttgtattttgtgcatgtatacaaaagtgttcccattgtcataaaacgcttgacaaatgttcccgaatgg

SEQ ID NO: 31230 - DNA, 260 bp, Unknown
  Description of Unknown: RightRegion for integrase B5231 sequence
cccttgctgttgtgctatgttcctctccctgcgggtatatttcgccgtagaggtgcctagcattcgttctaaggcgttttcgaatgctccccctcaaaactataccctaaaatttaaaacgccttagaatcgattttaagggcattctgagcgatttcatctatcttgtgaatactgcacaaatcataagcttgtattttgtgcaagtatacaaaaatgttcccattgtcataaaacacttgacaaatgttcccgaatgg

SEQ ID NO: 31231 - DNA, 109 bp, Unknown
  Description of Unknown: RightRegion for integrase B5232 sequence
agccgatggaacaaggatgcacaagacaaattcattcttgaattagagctattactttaacatacatcttaaatgttcaatagaaatggcacacgtagaaataatagct

SEQ ID NO: 31232 - DNA, 260 bp, Unknown
  Description of Unknown: RightRegion for integrase B5233 sequence
aaaaaggggcagaatcgttctgattttgaaattgacgtgtttccaaaagtaccgaaatagcggcgttctttcgctcgttgcatcttctacgagcgaaagaactcgctcacatggaaatggtatgcgccatcgtttatcagctcaccaaggacctttctccggaggaaatcgaacgctccggatttgctccttattatgtagatcacacacttgctctctggccacaggcagcaagcggcgccccatggacagcaacttat

SEQ ID NO: 31233 - DNA, 109 bp, Unknown
  Description of Unknown: RightRegion for integrase B5234 sequence
ggacgttggaataaggaagcacaagataatttttctattgaattagaactgaatctttaacatacatcataaatgttctaaagaaatggctcatgtagagataatagct

SEQ ID NO: 31234 - DNA, 109 bp, Unknown
  Description of Unknown: RightRegion for integrase B5235 sequence
gtcgaactcttcttctacaagaatgagtttgcgcttgtgtataggttgggggacgcctgatggcgtcccctttccgttcccgttgccgtgaaacgccgtattttgcgtt

SEQ ID NO: 31235 - DNA, 260 bp, Unknown
  Description of Unknown: RightRegion for integrase B5236 sequence
gcagaggaattggctgttagcagtgttcgattaagctccgcaagcagccaccatacttgagaaatccgaacttgattccgatagggaatgggttcggatttcttgtttttatcaaggacattgaagtttagtttcgggatagaataacatcaaattcaggaggatatacccatggaaaagctcataagctgtgcgttcaatatggataccgcctgtgtggagcttcgcttcacggacgggagcatttgctccatcgactg

SEQ ID NO: 31236 - DNA, 109 bp, Unknown
  Description of Unknown: RightRegion for integrase B5237 sequence
tcacaaaatgtggctgtttttgtttactgtattttttcgttggctctgaatagcttttaatatggactactttttcggaggtcgctatggaacaggcacagtataatat

SEQ ID NO: 31237 - DNA, 109 bp, Unknown
  Description of Unknown: RightRegion for integrase B5238 sequence
gaagctgcgggcgggtgttcggctcagctcccgccatctccaccacgaaagtcaggttaaaataaatgcaggtttgcatttgctttaacctgacttttttgttatactg

SEQ ID NO: 31238 - DNA, 260 bp, Unknown
  Description of Unknown: RightRegion for integrase B5239 sequence
ttcgcttccaatgcaccagcttcgcagagcccaaagctgacttcgcgcaggctcgtctgagccgtgaagcaggcgagaacgctggcacttatccgatttacagcggtgacatctttgagcagccgatggcgaagaactatcgcatcagcttcaccaatgatgtccgcttcaccatcaataagcgcactgccgttatcaacctgcttgagaccgagaagacctacggtgagaccatcacttctatgaatgtgaaggattac

SEQ ID NO: 31239 - DNA, 260 bp, Unknown
  Description of Unknown: RightRegion for integrase B5240 sequence
cagaataatccgaaactttttatctataaaaatgttttcgggcaaacaaaaacacactgaaatcagtgtgctttttattttactatagcccttttcgaataaggattttaaaggcttctgtagtggtatatccttgctcgaagagctcattaagtgcagataaaatgtcctcatcctctatctttcgcaatgataagataaatcgctgatataccttttttttgtatttcgcggttgcctcaagctgcgcgtccgatgtt

SEQ ID NO: 31240 - DNA, 260 bp, Unknown
  Description of Unknown: RightRegion for integrase B5241 sequence
gcccgtggccaacggcattcttctttttccatagacgtttttccgcgtatttctcgctgatcttttttacttccatcttgtatgtgctgattcctctgtgccaatatcggttaaaattcctgtcacttctttgtacggcatggtgtacctctgtgataaataacgcatggacgcagctaattctccatccggtccaccgaactgcgtaataataatctgtgcaattttcggattggtctgtgtgattttcaccggatact

SEQ ID NO: 31241 - DNA, 260 bp, Unknown
  Description of Unknown: RightRegion for integrase B5242 sequence
gcccatggccaacggcattcttctttttccatagacgtttttccgcgtatttctcgctgatcttttttacttccatcttgtatgtgctgattcgtttgcacatacaagatggaagtattttcttccttatttataataggatattttaaaggaatgttgcgaaactatctaaactgaatcgcctcaatttgcaatgcctgtccgactgtacccagtgtagatacgccgtcggctttcgtccagtctgtccaaccggaatt

SEQ ID NO: 31242 - DNA, 260 bp, Unknown
  Description of Unknown: RightRegion for integrase B5243 sequence
gcccgtggccaacggcattcttctttttccatagacgtttttccgcgtatttctcgctgatcttttttacttccatcttgtatgtgctgattcctctgtgccaatatcggttaaaattcctgtcacttctttgtacggcatggtgtacctctgtgataaataacgcatggacgcagctaattctccatccggtccaccgaactgactgatgattacctgggccatcttcggattggtctgggtaatttttacgggatatt

SEQ ID NO: 31243 - DNA, 260 bp, Unknown
  Description of Unknown: RightRegion for integrase B5244 sequence
aaaatagagttcagtagagaaaataataaagaatttatccttgatgtgttcttgaagtaatcttcaaggataatattttgtgaccaatatctatcatgggtgtgctatatttaaatctccaccatgatacaaatatacttaaaaaggatgatgtaaatgcgtataatatggaaagatagtttcgctaaagaatcatataagcctataagatacagaggatataccgctttgtgttgtcaagatagtgatgggtggattac

SEQ ID NO: 31244 - DNA, 260 bp, Unknown
  Description of Unknown: RightRegion for integrase B5245 sequence
aatccgaacatttttgtaacgcttgacgtgttcgggttagtcgttcagattgaacgctaaagaaataaccccgctttccggtaagggaaggcggggttattctcttttcctgctcatagctgcgcgaatagcaagcgccgccatgcagtaatttgttattgcttcgttcttttgcctgtaaagctccgacaggctcaacccatacattgcttgcagttttgcccgatgtcccgcatagcggcaacgccgatctatgaaga

SEQ ID NO: 31245 - DNA, 260 bp, Unknown
  Description of Unknown: RightRegion for integrase B5246 sequence
ccgttcctgttgctctatgtttcgctaccagaacgcagaaatcaacgagaacgcccctagaatcgtttctacggcgttttaagccgttcaccctcaaaactataccctaaaaacgaaaagccgcttagaaacgattctaggcggcttttgattcatttgcttacaatttcaccagcaccccacggagcgcctgcggctgttccagaatataccactttggggattcccttgaacgcattgacgccgattgtgcttacaga

SEQ ID NO: 31246 - DNA, 260 bp, Unknown
  Description of Unknown: RightRegion for integrase B5247 sequence
ctggatacggtccggcggctgctggacgacaacgctgcagcccccatgcagccaacataacaagaaacagcttgcagctggccgccaaaaaggcggcagcatcgccaggaagaacccttctcatgccatgcgccggtgcagcagcaccgcaagcaaggagtgacagaacattgtacagacaaaaaagcgccgcagcggtttgcgctgcggcaaaaaaagaagctcccctttcggagagcttcccggatcataccgaatgt

SEQ ID NO: 31247 - DNA, 260 bp, Unknown
  Description of Unknown: RightRegion for integrase B5248 sequence
gcccgtggccaacgacattcttctttttccatagacgtttttccgcgtatttctcgctgatcttttttacttccatcttgtatgtgctgattcctctgtgccaatatcggttaaaattcctgtcacttctttgtacggcatggtgtacctctgtgataaataacgcatggacgcagctaattctccatccggtccaccgaactgactgatgattacctgggccatcttcggattggtctgggtaatttttacgggatatt

SEQ ID NO: 31248 - DNA, 260 bp, Unknown; identical to SEQ ID NO: 31242
  Description of Unknown: RightRegion for integrase B5249 sequence

SEQ ID NO: 31249 - DNA, 260 bp, Unknown; identical to SEQ ID NO: 31242
  Description of Unknown: RightRegion for integrase B5250 sequence

SEQ ID NO: 31250 - DNA, 187 bp, Unknown
  Description of Unknown: RightRegion for integrase B5251 sequence
acaaaggaccataggggcaacgattttgatttagatatagaatggcgtttcactatgtaaaccctcgtttttatgcggtttcttgaccgttttaattttgtatgctcattttttctaacttgaacagtcttgttccctgcaactgtcatatatcttatcagtatgtacacacactgcttcacggaaa

SEQ ID NO: 31251 - DNA, 109 bp, Unknown
  Description of Unknown: RightRegion for integrase B5252 sequence
gcccgtggccaacggcattcttctttttctatagacgtttttccgcgtatttctcgctgatcttttttacttccatcttgtatgtgctgattcctctgtgccaatatcg

SEQ ID NO: 31252 - DNA, 260 bp, Unknown; identical to SEQ ID NO: 31244
  Description of Unknown: RightRegion for integrase B5253 sequence

SEQ ID NO: 31253 - DNA, 260 bp, Unknown
  Description of Unknown: RightRegion for integrase B5254 sequence
ttccgaaacgaaaacccagcggtcgcgctctccatccactgctatcctcgcaggtattaagggtatcatgcccgtaacgattcatcccaccccgcttgatacccgcaaatccccctcattcatccatcccattttcccttttcaaatcaaattctcgatcctgcatccaagcacgcccgcgattttcacaagcgtctcaatgcgtggcgcacgcccgttctcccatcggctcacgtctttttgcagacagccgatcttct

SEQ ID NO: 31254 - DNA, 260 bp, Unknown
  Description of Unknown: RightRegion for integrase B5255 sequence
gcaatccaattcgaactcatcaatggcatgaagttatcagaaagccgtgcagccacatgaagaacaggtacattcctttcggctataagattcaaaatggagattcagtcatcaacacggaacaagccgcaactgtacaacacatattctatgcgtataccgaaggacagagttttaaggaaattgcagaatacttgaccacaagtggcacagcctatcacttttcagataataactggaacaaaaatatcgttgcccgc

SEQ ID NO: 31255 - DNA, 145 bp, Unknown
  Description of Unknown: RightRegion for integrase B5256 sequence
gcccgtggccaacggcattcttctttttccatagacgtttttccacgtatttctcgctgatcttttttacttccatcttgtatgtgctgattcctctgtgccaatatcggttaaaattcctgtcacttctttgtacggcatggtg

SEQ ID NO: 31256 - DNA, 260 bp, Unknown
  Description of Unknown: RightRegion for integrase B5257 sequence
ttcgctgataattcaccaggtacgaaatcctccccgaagaagccgagcaaatccgcttaatgtatgagttgtatgcaaaaccgcaaacatcttatggcgacattgccagatacttttctgaacacggtatttttaaaaacgggaaagagtggtgcaggacaaggcttgcagaccatctcagaaatccaatttatgtaaaggcagatgaggaggtgtatgacttttacaagaggcagggagttgaaatcgtgaacgacaga

SEQ ID NO: 31257 - DNA, 145 bp, Unknown
  Description of Unknown: RightRegion for integrase B5258 sequence
gcccgtggccaacggcattcttctttttccatagacgtttttccgcgtatttctcgctgatcttttttacttccatcttgtatgtgctgattcctctgtgccaatatcggttaaaattcctgtcacttctttgtacggcatggtg

SEQ ID NO: 31258 - DNA, 260 bp, Unknown
  Description of Unknown: RightRegion for integrase B5259 sequence
cgtgctgacagtattatttcaacattgaagtatatggatgaaaacactgtttacttttagcgatttaataaacacatatctaataacgtgtgctcactttatcgataagctgcattcttacaatttgcaatgtggctggagagattcactcacctgaatgattctccatatggcatgactaaaccaaaccctgttcaggcactgagatagccatataaatcaaggcctggacgggttttcgttcctttctgaccctgtat

SEQ ID NO: 31259 - DNA, 260 bp, Unknown
  Description of Unknown: RightRegion for integrase B5260 sequence
aattcgaacatttttgtaatgcttgatgtgttcgggttagtcgttcagattgaacgataaagaaataaccccgctttcctgtaagggaaggcggggttattctcttttcctgctcatagctgcgcggatagcaagcgccgccatgcagtaatttgttattgctccgtttttttgcctgtaaagctccgacaggctcaatccgtacattgcttgcagttttgcccgatgtcctgcatagcggcaatggcgatctatgaaga

SEQ ID NO: 31260 - DNA, 260 bp, Unknown
  Description of Unknown: RightRegion for integrase B5261 sequence
gtaggcgaacatatgcaggtgttcgtcgttaggcgggcgttcgtgttgctcgtcgaatagaagaagccgctccatacggggcggcttctttgcgttctaggcctgcggcatgatctcctgctcgccgtcctcgtccatgtacggcatgaggaacacgccgccctgctcggtggtaagcagcaggtactcgcggttgtgctcgtcgcacacgatttcctggccgatgccctcgggcaggtcgtatatggggccgtccgtgc

SEQ ID NO: 31261 - DNA, 260 bp, Unknown; identical to SEQ ID NO: 31247
  Description of Unknown: RightRegion for integrase B5262 sequence

SEQ ID NO: 31262 - DNA, 260 bp, Unknown; identical to SEQ ID NO: 31244
  Description of Unknown: RightRegion for integrase B5263 sequence

SEQ ID NO: 31263 - DNA, 260 bp, Unknown
  Description of Unknown: RightRegion for integrase B5264 sequence
gcaatccaattcgaactcatcaatggcatgaagttatcagaaagccgtgcagccacatgaagaacaggtacattcctttcggctatcagattcaaaatggagattcagtcatcaacacggaacaagccgcaactgtacaacacatattctatgcgtataccgaaggacagagttttaaggaaattgcagaatacttgaccacaagtggcacagcctatcacttttcagataatagctggaacaaaaatatcgttgcccgc

SEQ ID NO: 31264 - DNA, 260 bp, Unknown
  Description of Unknown: RightRegion for integrase B5265 sequence
gtgttccatgatgggagtttggtgtttctattccgagatgggacggagataaaagtgtgagataattacagccctgttggagaaatccggcagggctgtttttttttcataactcaagtccataattgtaaaatcctggccttgccggaagctttccaacaccttggaaacaatccaacaaggctgctttttcactcctttttcctctccaaaacccacttaattttattaagtccaatcgacacccctcaaaaaacgcc

SEQ ID NO: 31265 - DNA, 109 bp, Unknown
  Description of Unknown: RightRegion for integrase B5266 sequence
ggttcgtatttgggcgggtcaggggtaccaaaggggagttcttataggactcccctttgaactttttgtgaacatttttcagaagctgcacgttggtgtgcaacttttc

SEQ ID NO: 31266 - DNA, 260 bp, Unknown
  Description of Unknown: RightRegion for integrase B5267 sequence
ccgttcctgttgctttatgtttcgctaccagaacgcagaaatcaacgagaacgcccctagaatcgtttctacggcgttttaagccgttcacactcaaaactatactctaaaaacgaaaagccgcttagaaacgattctaggcggcttttgagttattcgcttacaatttcaccagcaccccacggagcgcctgcggctgttccagaatataccactttggggatgtccttgaacgcattgacgccgattgtgcttacaga

SEQ ID NO: 31267 - DNA, 260 bp, Unknown
  Description of Unknown: RightRegion for integrase B5268 sequence
ccgttcctgttgctctatgtttcgctaccagaacgcagaaatcaacgagaacgcccctagaatcgtttctacggcgttttaagccgttcgccctcaaaactacaccctaaaaacgaaaagccgcttagaaacgattctaggcggcttttgactcatttgcttacaatttcgcctgcgccccacggagcgcctgcggctgttccagaatataccactttagggatacccttgaacgcattgacgccgattgtggttacaga

SEQ ID NO: 31268 - DNA, 109 bp, Unknown
  Description of Unknown: RightRegion for integrase B5269 sequence
gatgttgagttggtggagatgaggggagtcgaacccctgtccgaaaatattgcaatatgactttctccgagcgcagccgctaatttagattttgcttccttgacgccaa

SEQ ID NO: 31269 - DNA, 260 bp, Unknown
  Description of Unknown: RightRegion for integrase B5270 sequence
acaaaggaccataggggtaacgattttgatttagatatagaatggcgtttcactatgtaagccctcgtttttatgcggtttcttgaccgttttaattttgtatgctcatttttctaacttgaatagtcttgttccctgcaactgtcatatatcttatcagtatgtacacacactgcttcacggaaatttgtatcacaaggatattttctttctcttccgcagtcattacagcaatttctgttacaatcagccatttatta

SEQ ID NO: 31270 - DNA, 260 bp, Unknown
  Description of Unknown: RightRegion for integrase B5271 sequence
gtaggcgaacacatacgcgtgttcgtcgttaggcgggcgttcgtattgctcgtcagatagaaagaagccgctccatacggggcggcttctttgcgttctaggcctgcggcatgatctcctgctcgccgtcctcgtccatgtacggcatgaggaacacgccgccctgctcggtggtaagcagcaggtactcgcggttgtgctcgtcgcacacgatttcctggccgatgccctcgggcaggtcgtatatggggccgtccgtg

SEQ ID NO: 31271 - DNA, 260 bp, Unknown
  Description of Unknown: RightRegion for integrase B5272 sequence
cggaataatccgaaactttttatctacaaaaacgttttcgggcaaacaaaagcacactgaaatcagtgtgcttttttctttttttattgcattccttttcggataagaattttaaaagattctgtagtcgtgtacccttgatcaaaaagttctttgagtgccgataaaatatcggcatcgtcaatctttcttagcgaaacaatgaatctctcgtaggttttgatattgtatcgcgtatttgctgctattcttgcatctga

SEQ ID NO: 31272 - DNA, 260 bp, Unknown
  Description of Unknown: RightRegion for integrase B5273 sequence
aatccgaacatttttgtaacgcttgacgtgttcgggttagtcgttcagattgaacgctaaagaaataaccccgttttccggtaagggaaggcggggttattctcttttcctgctcatagctgcgcgaatagcaagcgccgccatgcagtaatttgttattgcttcgttcttttgcctgtaaagctccgacaggctcaacccatacattgcttgcagttttgcccgatgtcccgcatagcggcaacgccgatctatgaaga

SEQ ID NO: 31273 - DNA, 260 bp, Unknown; identical to SEQ ID NO: 31244
  Description of Unknown: RightRegion for integrase B5274 sequence

SEQ ID NO: 31274 - DNA, 260 bp, Unknown
  Description of Unknown: RightRegion for integrase B5275 sequence
ggttcgtatttgggcgggtcaggggtaccaaaggggagttcttataggactcccctttgaacttttcgtgaacatttttcagaagctgcacgttggtgtgcaacttttctctgttttgaaactatggatagaaggactttttccttactacaacattcggaggtttctatgacagaggaaaactacaattaccgtacaagtcaaactctcttgcgtaaccagttcccagggaaagggaaatggaaaattccggtaatacc

SEQ ID NO: 31275 - DNA, 260 bp, Unknown; identical to SEQ ID NO: 31244
  Description of Unknown: RightRegion for integrase B5276 sequence

SEQ ID NO: 31276 - DNA, 260 bp, Unknown
  Description of Unknown: RightRegion for integrase B5277 sequence
ttcacttccaatgcaccagcttcgcagaacccaaggctgacttcgcacaggctcgtctgagccgtgaagcaggcgagaacgctggcacttatccgatttacagcggtgacatctttgagcagccgatggcgaagaactatcgcatcagcttcaccaatgacgttcgcttcaccatcaataagcgcactgccgttatcaacctgcttgagaccgagaagacctacggtgagaccatcacttctatgaatgtgaaggattac

SEQ ID NO: 31277 - DNA, 260 bp, Unknown; identical to SEQ ID NO: 31244
  Description of Unknown: RightRegion for integrase B5278 sequence

SEQ ID NO: 31278 - DNA, 260 bp, Unknown
  Description of Unknown: RightRegion for integrase B5279 sequence
gcccgtggccaacggcattcttctttttttatagacgtttttccgcgtatttctcgctgatcttttttatttccatcttgtatgtgctgattcgtttgcacatacaagatggaagtatttttcttccttatttataataggatattaacacatcttcttatgaattgacagcttattattttatcctaagtttctgccctacataaatcagattcgggttagacatgccgttgagctgtgcaatcttctggtaggttgtg

SEQ ID NO: 31279 - DNA, 260 bp, Unknown
  Description of Unknown: RightRegion for integrase B5280 sequence
gcccgtggccaacggcattcttctttttctatagacgtttttccgcgtatttctcgctgatcttttttacttccatcttgtatgtgccgattcctctgtgccaatatcggttaaaattcctgtcacttctttgtacggcatggtgtacctctgtgataaataacgcatggacgcagctaattctccatccggtccaccgaactgactgatgattacctgggccatcttcggattggtctgggtaatttttacgggatatt

SEQ ID NO: 31280 - DNA, 260 bp, Unknown
  Description of Unknown: RightRegion for integrase B5281 sequence
ccgttcctgttgctctatgtttcgctaccagaacgcagaaatcaacgagaacgcccctagaatcgtttctacggcgttttaagccgttcaccctcaaaactatactctaaaaacgaaaagccgcttagaaacgattctgggcggcttttgactcatttgtttacaatttcaccagcaccccacggagcgcctgcggctgttccagaatataccactttagggatacccttgaacgcattgacgccgattgtggttacaga

SEQ ID NO: 31281 - DNA, 260 bp, Unknown
  Description of Unknown: RightRegion for integrase B5282 sequence
aaaatagagtttagtagagaaaataataaagaatttatccttgatgtgttcttgaagtaatcttcaaggataatattttgtgaccaatatctatcatgagtgtgctatatttaaatcaccaccatgatacaaatatacttaaaaaggatgatgtaaatgcgtataatatggaaagatagtttcgctaaagaatcatataagcctataagatacagaggatatacagttttgtgttgtcaagatagtgatggatggattac

SEQ ID NO: 31282 - DNA, 260 bp, Unknown; identical to SEQ ID NO: 31270
  Description of Unknown: RightRegion for integrase B5283 sequence

SEQ ID NO: 31283 - DNA, 260 bp, Unknown
  Description of Unknown: RightRegion for integrase B5284 sequence
aatcgatcaagcaatcctgccgagcatctaacactcgacatctaccccaaggttgattaggcagggcacaataatacgggtatcctgtgtgttgtgatgagtcacaacacgcatgatacccgcagtccttacttatactcctccaccatcgcgcggacccgcgcagtcttggcctggagcatggccagatcgtccgaccagctctccagtttaccgcgctcacgctcggtggtagtttcagcggcctcgcacttggcgat

SEQ ID NO: 31284 - DNA, 260 bp, Unknown; identical to SEQ ID NO: 31263
  Description of Unknown: RightRegion for integrase B5285 sequence

SEQ ID NO: 31285 - DNA, 260 bp, Unknown
  Description of Unknown: RightRegion for integrase B5286 sequence
aaaatagagtttagtagagaaaataataaagaatttatccttgatgtgttcttgaagtaatcttcaaggataatattttgtgaccaatatctatcatgggtgtgctatatttaaatctccaccatgatacaaatatacttaaaaaggatgatgtaaatgcgtataatatggaaagatagtttcgctaaagaatcatataagcctataagatacagaggatataccgctttgtgttgtcaagatagtgatgggtggattac

SEQ ID NO: 31286 - DNA, 260 bp, Unknown
  Description of Unknown: RightRegion for integrase B5287 sequence
gaagctgtgggcgggtgttcggctcagctcccgccatctccaccacgaaagtcaggttaaaataaatgcaggtttgcatttgctttaacctgacttttttgttatactgcaatcaaggttatttatataatatacggaatacagagcaatcatttaaaattctagaggaagaacagtgtttagagagatattaacagaattaattaaagataacgaatgggcaaagttgcaaaaaccgtgtgatgagagtgaacttgcta

SEQ ID NO: 31287 - DNA, 260 bp, Unknown; identical to SEQ ID NO: 31242
  Description of Unknown: RightRegion for integrase B5288 sequence

SEQ ID NO: 31288 - DNA, 260 bp, Unknown
  Description of Unknown: RightRegion for integrase B5289 sequence
aatccgaacatttttgcaacgcttgacgtgttcgggttagtcgttcagattgaacgctaaagaaataaccccgctttccggtaagggaaggcggggttattctcttttcctgctcatagctgcgcgaatagcaagcgccgccatgcagtaatttgttattgcttcgttcttttgcctgtaaagctccgacaggctcaacccatacattgcttgcagttttgcccgatgtcccgcatagcggcaatgccgatctatgaaga

SEQ ID NO: 31289 - DNA, 260 bp, Unknown
  Description of Unknown: RightRegion for integrase B5290 sequence
aattcgaacatttttgtaacgcttgatgtgttcgggttagtcgttcagattgaacgataaagaaataaccccgctttcctgtaagggaaggcggggttattctcttttcctgctcatagctgcgcggatagcaagcgccgccatgcagtaatttgttattgctccgtttttttgcctgtaaagctccgacaggctcaatccgtacattgcttgcagttttgcccgatgtcctgcatagcggcaatggcgatctatgaaga

SEQ ID NO: 31290 - DNA, 260 bp, Unknown
  Description of Unknown: RightRegion for integrase B5291 sequence
aaaatagagtttagtagagaaaataataaagaatttatccttgatgtgttcttgaagtaatcttcaaggataatattttgtgaccaatatctatcatgggtgtgctatatttaaatctccaccatgatacaaatatacttaaaaaggatgatgtaaatgcgtataatatggaaagatagtttcgctaaagaatcatataagcctataagatacagaggatatacagttttgtgttgtcaagatagtgatgggtggattac

SEQ ID NO: 31291 - DNA, 260 bp, Unknown
  Description of Unknown: RightRegion for integrase B5292 sequence
tcatttgaatttgaactcatcaatggtatgagggtgtcggagaggagaacttcaaaatgaggaaacgatatcttcctttcggttatcaaatcgaacaaggcaaaattgcgattgtatcaaaagaaagcaacgcagttagattcatctttgaggaatacctggcaggaaagtctcttaaaggaattgcagatattatgtctgcaaaagatatcccttatcatgaaggcacccaaaaatggaatcaaaacatggtgggacga

SEQ ID NO: 31292 - DNA, 260 bp, Unknown
  Description of Unknown: RightRegion for integrase B5293 sequence
aatccgaacatttttgtatcgcttgatgtgttcgggttagtcgttcagattgaacgctaaagaaataaccccgctttccggtaatggaaggcggggttattctatttcgctgaatgaagtacacataccagcgccgtgtagtaatgcaaaagcgccgtatctttgaagcggtacaatactgaattttccatgttaagcgccgcttgaagtttgatccggtcagcgcgtccgtgattgcgattgatgtagaaccattcaag

SEQ ID NO: 31293 - DNA, 260 bp, Unknown
  Description of Unknown: RightRegion for integrase B5294 sequence
gcccgtggtcaacggcattcttctttttccatagacgtttttccacgtatttctcgctgatcttttttacttccatcttgtatgtgctgattcctctgtgccaatatcggttaaaattcctgtcacttctttgtacggcatggtgtacctctgtgataaataacgcatggacgcagctaattctccatccggtccaccgaactgactgatgattacctgggccatcttcggattggtctgggtaatttttacgggatatt

SEQ ID NO: 31294 - DNA, 109 bp, Unknown
  Description of Unknown: RightRegion for integrase B5295 sequence
aactgtgtattcgacaaggacagctacacccttgcgataacctatcgcattattttgtgacccattttataggctattggagtacggcggtcccgacggggagctgggc

SEQ ID NO: 31295 - DNA, 260 bp, Unknown; identical to SEQ ID NO: 31242
  Description of Unknown: RightRegion for integrase B5296 sequence

SEQ ID NO: 31296 - DNA, 260 bp, Unknown
  Description of Unknown: RightRegion for integrase B5297 sequence
ttccgaaacgaaaacccagcggtcgcgctctccatccactgctatccccgaaggtattaagggtatcatgcccgtaacgattcatcccaccccgcttgatacccgcaaatccccctcattcatccgtccccattttcccttttcaaatcaaatcttcgatcctgcatccaagcacgcccgcgattttcacaagcgtctcaatgcgcggcgcacgcccgttctcccatcggctcacgtctttttgcagacaaccgatcttc

SEQ ID NO: 31297 - DNA, 147 bp, Unknown
  Description of Unknown: RightRegion for integrase B5298 sequence
aaaaaaagaacttcaagatttaatatcaaaatatatccaaggttaataaaaaataagtaaattataactgttatcatcaaactgataaccaatttaacgtcatgagtggtgcatttgctggaggtgaaggagattacgttgcgttat

SEQ ID NO: 31298 - DNA, 260 bp, Unknown
  Description of Unknown: RightRegion for integrase B5299 sequence
cagaatggctgcggattccatgtcgcagatgtcggctccgaactcattgtgcagccatagcttctctgcggcgtctcccacaaacttgtcgccggatgcgcaaaccacccgatggagttcgggggaggccaaatccgtgaaagcagtgcttaccggcagcagccggtccgggtattccaaatagcggccagccggcacattatcaacagcaaacaggtcatattggtaatgcgccacctttaccacgacacatatctcgc

SEQ ID NO: 31299 - DNA, 62 bp, Unknown
  Description of Unknown: RightRegion for integrase B5300 sequence
ttcacttccaatgcaccagttttgccggatctatatttccttttttatcacaatccttaggc

SEQ ID NO: 31300 - DNA, 260 bp, Unknown
  Description of Unknown: RightRegion for integrase B5301 sequence
ttcgcttccaatgcacctccttgtcagaccagtccgaagacggccaggatcagcccgtagatcacgcttgcgctgatgccgtagacgatcaccggccctgcgatcgtgaagatcttgaccgccgtgcccgtgacgaagccctcggtcttgaattccagcgctggggacaccacggagtttgcaaaccccgtgatcggcaccagagatcctgccccggcgaaccgcgccagatcgtcgtaaacgcccagccccgtcagcag

SEQ ID NO: 31301 - DNA, 61 bp, Unknown
  Description of Unknown: RightRegion for integrase B5302 sequence
aatccgaacatttttgtaacgcttgacgtgttcgggttagtcgttcagattgaacgctaaa

SEQ ID NO: 31302 - DNA, 260 bp, Unknown
  Description of Unknown: RightRegion for integrase B5303 sequence
tgctattttaataagatagcaatcctacttttttacccaaaagtgtctcgaacgccttgaaatatggccattctcggcatttttcgctatcgctataagtaagattaaaaaggaatcctgaaccgggtttgtcccagctcaggattcttgcattcatggctctttttaagtaagaaataataattccatgacaggtctgcgcctccgttgaccacttgaacctcctgtgctatcatacgaatacaatactgtccatcagg

SEQ ID NO: 31303 - DNA, 260 bp, Unknown
  Description of Unknown: RightRegion for integrase B5304 sequence
ttggatattaaaggggcaccaaagaaaaaccgcttaggtaagccttttatggcagcctaggcggttttctttttgtgctgattttggcgcttgctcaagttctgctcaagtagcaccgaggaagtgccgagttagggcagaatagggaaaattacggcagattaggacaaaagagggaaagcggaaaagagcacccaaaacacaacaatttgagcagcgaaccagagaacacaggttaccccgtattggtgatgccacca

SEQ ID NO: 31304 - DNA, 260 bp, Unknown
  Description of Unknown: RightRegion for integrase B5305 sequence
ggtgaagtgttcggacgctgtgcgcaaagtcctgccaaaagaccgtcagtgaaaagctgacggtctttttgtgtttatatatcgaaaagtctccggcaagcaagcgggtcagactgccaatacagtgctacctgtactatgcatgtgttgtgttcccctgatgggcttgcctgcagggtcagtctgctttcacatcaaaatacgcttgcagatgccgtggccgtcttgcgctatgctgggtctggcgacaactgtagggg

SEQ ID NO: 31305 - DNA, 260 bp, Unknown
  Description of Unknown: RightRegion for integrase B5306 sequence
gcccgtggccaacggcattcttctttttccatagacgtttttccgcgtatttctcgctgatcttttttttacttccatcttgtatgtgctgattcctctgtgccaatatcggttaaaattcctgtcacttctttgtacggcatggtgtacctctgtgataaataacgcatggacgcagctaattctccatccggtccaccgaactgactgatgattacctgggccatcttcggattggtctgggtaatttttacgggata

SEQ ID NO: 31306 - DNA, 109 bp, Unknown
  Description of Unknown: RightRegion for integrase B5307 sequence
aaggaaattaggttcaatgggaatgatgaaattgaggttgtacttgtaggtggtatttaaactgggttgcacaacctgcccatccaccacctacaactataacttttat

SEQ ID NO: 31307 - DNA, 260 bp, Unknown
  Description of Unknown: RightRegion for integrase B5308 sequence
aatccgaacatttttgtaacgcttgacgtgttcgggttagtcgttcagattgaacgctaaaaaataaccccgctttccggtaatggaaggcggggttattctattctgctgaatgaagtacacataccaacgctgtgtagtagtgtaaaagtgccgtatctttgaagcggtacaataccgaattttccatgttaagcgccgcttgaagtttaatccggtcagcgcgtccgtgatttctgttgatatagaaccattcaagc

SEQ ID NO: 31308 - DNA, 260 bp, Unknown
  Description of Unknown: RightRegion for integrase B5309 sequence
tgttcatccttgagcacccctgctccaccaactcggtcacgattgcatatgcagtcgtgacttttttaggctctatgtcaatagttggggaaaacccgaaaaagaagaattgaaatgaacaagcgatagtaaatcaagctatcgcttgtttttgcatttggtgagaaaacatatgtaaaatacgattacggaaacgcttaaaatttctgtaaccataagcattacgcttgttctgtaagccgcctttaccgtagtataaa

SEQ ID NO: 31309 - DNA, 260 bp, Unknown
  Description of Unknown: RightRegion for integrase B5310 sequence
cagtcgctttctgaagtcactgagaggggtttaatagatgttgatgaggttatcatatagttgagattctatcgtcagtagcgcttgttaggattcacactaaacttccgtaaagcattacccgacttaagcacctttgaagcttgctcattagctgaggctgtgaaggtgctctcaccatttttaacgctaacgctcttagagcacgttacacgggcttttagcgcttcatctgataactcacttgccgaatagctaaa

SEQ ID NO: 31310 - DNA, 260 bp, Unknown
  Description of Unknown: RightRegion for integrase B5311 sequence
aaaaaaagaacttcaaggtttaatatcaaaatctatccaaggttaataaaaaataaataaattataactgttatcataaaaccgataaccaattcaacgttatgagtggtgcatttgctggaggtgaaggagattacgttgcgttatttgaaccttctgctttagaacttgaaaaacaaggtaaaggatacgtagtagcttctattggtgaagaatccggtttaataccatacactgcttactcagctcccttaaactat

SEQ ID NO: 31311 - DNA, 260 bp, Unknown
  Description of Unknown: RightRegion for integrase B5312 sequence
gcgatagaatttgaactcatcaatggtatgaaactttcggaggaacggacggaaaaatgaaaaagcgatatctgccatttggctaccaaatcacagacggaaaaacaactatagttcaagaagaagccgaagctgtgcaatatatttttgaggaatacacagcagggaagtccctccggaagattgcagagaacatgacagcgaggaaaactccatatcatgaagattcctcaaaatggaaccagaacatggtgagccgc

SEQ ID NO: 31312 - DNA, 260 bp, Unknown
  Description of Unknown: RightRegion for integrase B5313 sequence
aaaagtaaaaaaggcagcaatgaggattacttcgagttagaaataacactaaatatataattattatgtatagcattgatgtgcatatgaataggttcgttaatgctatacataaaataagctaaggaaaataacttccctagccttattttatactatgaacaacatagcacacaatacaccaataccaaagtatgcaatgcgccctgctacttctaagataattttattcatgcacctacctcctttttaggattata

SEQ ID NO: 31313 - DNA, 260 bp, Unknown
  Description of Unknown: RightRegion for integrase B5314 sequence
ttccgaaatgataatccagccgattttttatctttggacttttatccgatgcttgaataatacaaaacaaaggtatgatcagtgtcttgatgaattacatcattgatcatacctttattatttgctcatttccagccgtcgatcagcgcttttacttccgccgttttcgcgatctggtcattgtggattgcttcccacgcggcgatcatgccgttggtatactccggattgcgcttgtaatcgtcgctggtcttcgcggt

SEQ ID NO: 31314 - DNA, 260 bp, Unknown
  Description of Unknown: RightRegion for integrase B5315 sequence
tccgcccagcaggcgataagtactcttaaatatatggttgatggtgagatttatttttgagtaataatcactttttcaaccgtgctatggtatgaaagtaaagtaactaatatgatattaactatcttgaacgaagcgccctgagctatagttttactataggcactgccactggatgttggcattcttgctctagtagctcaacaatacccaatcacaaaacaattcactgataacaaactttgtgcacgtgcttggtt

SEQ ID NO: 31315 - DNA, 260 bp, Unknown
  Description of Unknown: RightRegion for integrase B5316 sequence
tccgcccagcaggcgataagtactctcaaatatatggttgatggtgaggtttatttttgagtaataatcactttttcaaccgtgctatggtatgaaagtaaagtaactactatgatattaactatcgagcaagaatatccccaggcactcaacagggcgcaggtcaacgtgaatcggtcatgacacgacaccgattttgcggaatcaatgttgcttatgaatacaacatcccgcttagtacatgttcaacacatcagcaa

SEQ ID NO: 31316 - DNA, 260 bp, Unknown
  Description of Unknown: RightRegion for integrase B5317 sequence
tccgcccagcaggcgataagtactctcaaatatatggttgatggtgaggtttatttttgagtaataatcactttttcaaccgtgctatagtaagaaagttaggtaagtacattaaaattatctatcctgaacgaagcgtcctgagctatggttttactatagagactgccaatggatgctggcgttctcgttctagcagttcaacaatacccaatcacaaaacaattcactgataacgaactttgcacactcgcctggtt

SEQ ID NO: 31317 - DNA, 260 bp, Unknown
  Description of Unknown: RightRegion for integrase B5318 sequence
tccgcccagcaggcgataagtgctctcaaatatatggttgatggtgagatttatttctaaataatgatctcggattttaagttatgctatggtgataaagtgcaagacagaattaattatctttgacgaaacttaatgggtaattactttgtttgctcccacaagcgagttttgtacggctgtattggggtagtaaatgagctatacaatcttaatcatttgttaggtgagaactcttggtcgcagattcaaatactgaa

SEQ ID NO: 31318 - DNA, 260 bp, Unknown; identical to SEQ ID NO: 31317
  Description of Unknown: RightRegion for integrase B5319 sequence

SEQ ID NO: 31319 - DNA, 260 bp, Unknown
  Description of Unknown: RightRegion for integrase B5320 sequence
tccgcccagcaggcgataagtgctctcaaatatatggttgatggtgaggtttatttttgagtaataatcactttttcaaccgtgctatagtaagaaagttaggtaagtacaataaaattatctatcctgaacgaagcgtcctgagctatggttttactatagggactgccaatggatgctggcgttctcgttctagcagttcaacaatccccaatcacaaaacaattcactgataacgaactttgcacactcgcctggtt

SEQ ID NO: 31320 - DNA, 260 bp, Unknown
  Description of Unknown: RightRegion for integrase B5321 sequence
acctgcaaagaagagaagccacagcgcaaagagtacagcgccggcggcagagaagattagactggcagcgtattgtcgagtatcaacagatcatgaggaacaggccagctcatttgagaatcaaaaggaatattacagcaagtatgtagataagcataaagaatatgagctggcaggtatttatgcagatgaaggtattacagcgacaaacacaaagaaacgtgatggatttaaccagatgattgcggattgtgaagaag

SEQ ID NO: 31321 - DNA, 260 bp, Unknown
  Description of Unknown: RightRegion for integrase B5322 sequence
tccgcccagcaggcgataagtactctcaaatatatggttgatggtgaggtttatttttgagtaataatcactttttcaaccgtgctatagtaagaaagttaggtaagtacaataaaattatctatcctgaacgaagcgtcctgagctatggttttactatagggactgccaatggatgctggcgttctcgttctagcagttcaacaatccccaatcacaaaacaattcactgataacgaactttgcacactcgcctggtt

SEQ ID NO: 31322 - DNA, 260 bp, Unknown
  Description of Unknown: RightRegion for integrase B5323 sequence
agtcacattgacgtagatttttatttgaccgaaaatccagaaatgcccgcaaacccttgatttatgcgggtttgcgggcatctatacgcactggcaatttggttgacacaatggggatcctgctccttaggccagcagggctacagccctattgagatccttcgctattactacggtgacagcatctatatcaacacagcggaacagattgccgggatccctgcttcctggccgggctatgacctgacagtgggaagttc

SEQ ID NO: 31323 - DNA, 260 bp, Unknown
  Description of Unknown: RightRegion for integrase B5324 sequence
tctgcccagcaggcgataagtactctcaaatatatggttgatggtgaggtttatttttgagtaataatcactttttcaaccgtgctatagtaagaaagttaggtaagtacaataaaattatctatcctgaacgaagcgtcctgagctatggttttactatagggactgccaatggatgctggcgttctcgttctagcagttcaacaatccccaatcacaaaacaattcactgataacgaactttgcacactcgcctggtt

SEQ ID NO: 31324 - DNA, 260 bp, Unknown
  Description of Unknown: RightRegion for integrase B5325 sequence
tccgcccagcaggcgataagtgctctcaaatatatggttgatggtgagatttatttctaaataatgatctcggattttaagttatgctatggtgataaagtccaagacagaattaattatctttgacgaaacttaatgggtaattactttgtttgctcccacaagcgagttttgtacggctgtattggggtagtaaatgagctatacaatcttaatcatttgttaggtgagaactcttggtcgcagattcaaatactgaa

SEQ ID NO: 31325 - DNA, 260 bp, Unknown
  Description of Unknown: RightRegion for integrase B5326 sequence
gatgatacgaatggtaaatattgtgttccaaaattaaagcttaatattattttatattagtctttaaataagttgtttgtctgctactatttgggcaaacatcaaaaaagtttattatggaaacacagctaaagatgctgataaaattggttttagagatgatttcatctacaactatattgaaggaaaatgccaagatatctccgttttagatttagaacaatttggtagagatatcactataaaatcctttgataact

SEQ ID NO: 31326 - DNA, 260 bp, Unknown
  Description of Unknown: RightRegion for integrase B5327 sequence
aagtgtaaaaaaggcagcaatgaggattactttgagttagaaataacactaaatatataattattatgtatagcatcgatgtgcatatgaattagctcgttaatgctatacataaaataagctagagaatataatttccctagccttttttacgtgttatttccttacatcattattaatatagcacttgctactccaattcctaagtatgcaatacgccctgtaacttccagcattaattttttcatagtcattacctc

SEQ ID NO: 31327 - DNA, 143 bp, Unknown
  Description of Unknown: RightRegion for integrase B5328 sequence
aaaagtaaaaaaggcagcaatgaggattactttgagttagaaataacactaaatatataattattatgtatagcattgatgtgcatatgaataggttcgttaatgctatacataaaataagctaaggaaaataacttccctag

SEQ ID NO: 31328 - DNA, 260 bp, Unknown
  Description of Unknown: RightRegion for integrase B5329 sequence
gatgatacgaatggtaaatattgtgttccaaaattaaagcttaatattattttatattagtctttaaataagttgtttgtctgctactatttgggcaaacattaaaaaagtttattatggaaacacagctaaagatgctgataaaattggttttagagatgatttcatctacaactatattgaaggaaaatgccaagatatctccgttttagatttagaacaatttggtagagatatcactataaaatcctttgataact

SEQ ID NO: 31329 - DNA, 260 bp, Unknown
  Description of Unknown: RightRegion for integrase B5330 sequence
aagtgtaaaaaaggtagtggtgaggattattttgaattagaaattacactaaatatataattattatgtatagcattgatgtgcatatgaataagttcgttgatgctatacataataatagctagagaattatttttccctagctatttattatttattatctggaatgtattccattatatctccaggttgacaatctaattctctacatatagattctattacttttaaagatacatactcatttttagaaattttcg

SEQ ID NO: 31330 - DNA, 260 bp, Unknown; identical to SEQ ID NO: 31319
  Description of Unknown: RightRegion for integrase B5331 sequence

SEQ ID NO: 31331 - DNA, 260 bp, Unknown
  Description of Unknown: RightRegion for integrase B5332 sequence
aaaagtaaaaaaggcagcaatgaggattactttgagttagaaataacactaaatatataattattatgtatagcatcgatgtgcatatgaattagctcgttaatgctatacataaaataagctagagaatataatttccctagccttttttacgtgttatttccttacatcattattaatatagcacttgctactccaattcctagatatgcaatacgccctgtaacttccagtattatttttttcatagtcattacctc

SEQ ID NO: 31332 - DNA, 260 bp, Unknown; identical to SEQ ID NO: 31322
  Description of Unknown: RightRegion for integrase B5333 sequence

SEQ ID NO: 31333 - DNA, 260 bp, Unknown
  Description of Unknown: RightRegion for integrase B5334 sequence
tccgcccagcaggcgataagtactctcaaatatatggttgatggtgaggtttatttttgagtaataatcactttttcaaccgtgctataataagaaagttaggtaagtacaataaaattatctatcctgaacgaagcgtcctgagctatggttttactatagagactgccaatggatgctggcgttctcgttctagcagttcaacaatacccaatcacaaaacaattcactgataacgaactttgcacactcgcctggtt

SEQ ID NO: 31334 - DNA, 260 bp, Unknown
  Description of Unknown: RightRegion for integrase B5335 sequence
aagtgtaaaaaaggtagtggtgaggattattttgaattagaaattacactaaatatataattattatgtatagcattgatgtgcatatgaataagttcgttgatgctatacataataatagctagagaatataatttccctagctatttttattacatcattattaatatagcacttactactccaattcctaagtatgcaatgcgccctgtaacttccaatactaattttctcatagtcattacctccttcattaggat

SEQ ID NO: 31335 - DNA, 260 bp, Unknown
  Description of Unknown: RightRegion for integrase B5336 sequence
tccgcccagcaggcgataagtactctcaaatatatggttgatggtgaggtttatttttgagtaataatcactttttcaaccgtgctatagtaagaaagttaggtaagtacaataaaattatctatcctgaacgaagcgtcctgagctatggttttactatagggactgccaatggatgctggcgttctcgttctagcagttcaacaatacccaatcacaaaacaattcactgataacaaactttgtgcacgtgcttggtt

SEQ ID NO: 31336 - DNA, 260 bp, Unknown
  Description of Unknown: RightRegion for integrase B5337 sequence
aagtgtaaaaaaggtagtcgtgaggattattttgaattagaaataacactaaatatataattattatgtatagcattgatgtgcatatgaattagctcgttaatgctatacataaaataagctagagaatataatttccctagccttttttacgtgttatttccttacatcattattaatatagcacttgctactccaattcctagatatgcaatgcgccctgttatctccagcattatttttttcatagtcattacctc

SEQ ID NO: 31337 - DNA, 260 bp, Unknown
  Description of Unknown: RightRegion for integrase B5338 sequence
tccgcccagcaggcgataagtactctcaaatatatggttgatggtgaggtttatttttgagtaataatcactttttcaaccgtgctatagtaagaaagttaggtaagtacaataaaattatctatcctgaacgaagcgtcctgagctatgattttactatagggactgccaatggatgctggcgttctcgttctagcagttcaacaatccccaatcacaaaacaattcactgataacgaactttgcacactcgcctggtt

SEQ ID NO: 31338 - DNA, 260 bp, Unknown
  Description of Unknown: RightRegion for integrase B5339 sequence
ttccgaaatgataatccagccgattttttatctttggactttttcccggtgcttgaataacgtaaaataaaggtatgatcagtgtcttgatgaattacatcattgatcatacctttattatttgcttatttccagccgtcgattagcgcttttacttccgccgttttcgcgatctggtcattgtggatcgcttcccacgcggcgatcatgccgttggtatactccggattgcgcttgtaatcgtcgctggtcttcgcggc

SEQ ID NO: 31339 - DNA, 260 bp, Unknown
  Description of Unknown: RightRegion for integrase B5340 sequence
tccgcccagcaggtgataagtactctcaaatatatggttgatggtgaggtttatttttgagtaataatcactttttcaaccgtgctatagtaagaaagttaggtaagtacaataaaattatctatcctgaacgaagcgtcctgagctatggttttactatagggactgccaatggatgctggcgttctcgttctagcagttcaacaatccccaatcacaaaacaattcactgataacgaactttgcacactcgcctggtt

SEQ ID NO: 31340 - DNA, 260 bp, Unknown
  Description of Unknown: RightRegion for integrase B5341 sequence
agtcgctggaagaacgacgcgatgaaagagttcaagttagaaatccatatgaaggtttaatttttattatatctattatagacatcctatatgaacagacgaacttgctcatgttgaaattattagtactcttttctatcaacttacaaatggtctaacacctcaagaaattaaagagggtggactagatgcttattttactgatcacactttaggaatttatccaacaaacagtgcaggtattccttttagtgcagata

SEQ ID NO: 31341 - DNA, 260 bp, Unknown
  Description of Unknown: RightRegion for integrase B5342 sequence
tcaaggttctgcgacatctgcaccgcaccccaacggtcaaatgctatctctttgatatgaaatttctgtcctagctcatcgatgaagttttcgataaaaccatagtgaaccacatttccctcagttgttttcagatagccttgccgttcccatatatcatagggaacgtggtcacggcgaactcttaaaggcaatgtttcttccggcagccagaagtatggcaaaatgtaataatgctcatcatcttcagtgggtggaaa

SEQ ID NO: 31342 - DNA, 260 bp, Unknown; identical to SEQ ID NO: 31322
  Description of Unknown: RightRegion for integrase B5343 sequence

SEQ ID NO: 31343 - DNA, 260 bp, Unknown
  Description of Unknown: RightRegion for integrase B5344 sequence
gataatacgaatggtaaatattgtgttccgaaaataaagcttaatattgttttatattagtctttaaataggttgtttatctgctactatttgggcaaacatcaaaaaagtttattatggaaacacagctaaagatgctgataaaattggttttagagatgatttcatctacaactatattgaaggaaaatgccaagatatctccgttttagatttagaacaatttggtagagatatcactataaaatcctttgataact

SEQ ID NO: 31344 - DNA, 260 bp, Unknown
  Description of Unknown: RightRegion for integrase B5345 sequence
aactttcaaaaactttttatgggaaaaagaacaaccgtgttccgtattttgagacgctaacagcaattttgaaaacaattctacttgaaatagaaaaatcatcgcctttaactaagcatatgccgaacagatgtggtgtcgttaagaatgcgtctcgtagatctatattggcccgtagctcagatggtagagcgtctgactgttaatcagatggtcgcaggttcgagtcctgccgggtcagccatattgcggggtgtagc

SEQ ID NO: 31345 - DNA, 260 bp, Unknown
  Description of Unknown: RightRegion for integrase B5346 sequence
agtcaacatgagctggaatttcatttgataggcggattaaagtttgaagaaaaaatatagccaaactgccttgcaagtcaaatcgcaaggcagttttttgttgctgttggtaatagcttttgagaagaaaatgtggtattgttgtaggtcgaaaggaggcgagatcatggctaaaaacagaacgataccgttcggatactgtatgaaaaacggtgagataacaaccgagccaaaagaagtttacgccgttgttaaaatat

SEQ ID NO: 31346 - DNA, 260 bp, Unknown
  Description of Unknown: RightRegion for integrase B5347 sequence
tccgcccagcaggcgataagtgctctcaaatatatggttgatggtgaggtttatttttgagtaataatcactttttcaaccgtgctatggtatgaaagtaaagtaactactatgatattaactatcgagcaagaatatccccaggcactcaacagggcgcaggtcaacgtgaatcggtcatgacacgacaccgattttgcggaatcaatgttgcttatgaatacaacatcccgcttagtacatgttcaacacatcagcaa

SEQ ID NO: 31347 - DNA, 260 bp, Unknown
  Description of Unknown: RightRegion for integrase B5348 sequence
gaagaggatgccgacctctcggggtgttcgtataagctcccctcaaacccaccaacgtaaaagttgacaattgaaagttgacaattgaaagtgataaaagatggacaatattattgaaagtaaaagctttgattttgcaattcgaattgtcaacctgtataagtacctgactgacggaaagaaagaaaatattctttcaaagcagttgcttcacagtggaacaagcatcggtgcaaatgttgccgaagccgagcaagcac

SEQ ID NO: 31348 - DNA, 260 bp, Unknown
  Description of Unknown: RightRegion for integrase B5349 sequence
aaaagtaaaaaaggcagcaatgaggattactttgagttagaaataacactaaatatataattattatgtatagcattgatgtgcatatgaattagttcgttaatgctatacataaaataagctagagaatataatttccctagccttttttatgtgttatttccttacatcattattaatacagcacttgctactccaattcctagatatgcaatacgccctgtaatttccagcattatttttttcatagtcattacctc

SEQ ID NO: 31349 - DNA, 260 bp, Unknown
  Description of Unknown: RightRegion for integrase B5350 sequence
cgctcacttagaaatcaacctaaggacaactttgatttagttataaaactgcgaatttaattatttttataattatcttcgcttacaaagttgacacactgtttcaatagtgttaatatgttgttagcgaataaaaaggctttttaaaaagtctttttatttttagcctacaattactcttttgtataaatattttatgctaaagtgtcatatttcagagttgagcgtaaatctctttaaaaattactggtgaggtgtag

SEQ ID NO: 31350 - DNA, 260 bp, Unknown; identical to SEQ ID NO: 31317
  Description of Unknown: RightRegion for integrase B5351 sequence

SEQ ID NO: 31351 - DNA, 260 bp, Unknown
  Description of Unknown: RightRegion for integrase B5352 sequence
aaaagtaaaaaaggcagcaatgaggattactttgagttagaaataacactaaatatataattattatgtatagcattgatgtgcatatgaattagctcgttaatgctatacataaaataagctagagaatataatttccctagccttttttacgtgttatttccttacatcattattaatatagcacttgctactccaattcctagatatgcaatgcgccctgttatttccagcattaattttttcatagtcattacctc

SEQ ID NO: 31352 - DNA, 260 bp, Unknown
  Description of Unknown: RightRegion for integrase B5353 sequence
tccgcccagcaggcgataagtactcttaaatatatggttgatggtgagatttatttttgagtaataatcactttttcaaccgtgctatggtatgaaagtaaagtgactaatatgatattaactatcttgaacgaagcgccctgagctatagttttactataggcactgccactggatgttggcattcttgctctagtagctcaacaatacccaatcacaaaacaattcactgataacaaactttgtgcacgtgcttggtt

SEQ ID NO: 31353 - DNA, 260 bp, Unknown
  Description of Unknown: RightRegion for integrase B5354 sequence
gacggggaggagttcggatgccgtgcgtctcgctccaccataactggacaccagttttgatacaatgagtatcgaagcgggtgtccagtttctttttgcaaaagtccctatttgcaagggttttcatataccttttaacgaaagcaggctctacggtaaccgagaaatggtcgccgtagagcctttttgcatttttgcctatgtactttttaattataggtcttgagggtgtgcattgggttcagaggaataattaaaag

SEQ ID NO: 31354 - DNA, 260 bp, Unknown
  Description of Unknown: RightRegion for integrase B5355 sequence
atcgcggatggtgtcgttgaaaagttcgtacaccgtgcgtcatgctccaccatggtgtgagcgaagaagtataccacaaaatgctggatagcgatgaaaccgactcaaacaagtcaagcgaagaagtcactttcatcttaacaattacgtataaatgcaacatgcactgtacttactgctatcagcaaaacgataaaaccttggaaaagaaacttatcagtgatgaaactctggataaaattttaagtatcattgcacag

SEQ ID NO: 31355 - DNA, 260 bp, Unknown
  Description of Unknown: RightRegion for integrase B5356 sequence
aagtgtaaaaaaggcagcaatgaggattactttgagttagaaataacactaaatatataattattatgtatagcatcgatgtgcatatgaattagctcatgttgaaataatttcatctatgatttatcaattaactgatggagctactcctgaagaattaaaagctgctggaatggacactaactatgctcaatttggtcatggtattcaaccaacagattcaaatggagttccttttacaactgcttatataaatgtgt

SEQ ID NO: 31356 - DNA, 260 bp, Unknown
  Description of Unknown: RightRegion for integrase B5357 sequence
gatttcgcttccaatgcaccaggtatgaagaatacagatataccctatattagctcctagatactttgcgtcttttgccaattcattcaaggttgctgaggcagcatgatacagtgtatcatacaacagcttctggttgctgtaaatgatggaattcaattcatcaggaactgtgaatactacatgataataaggtgcatcaagtacgttctctttttgtgcatcaatccatttctctttcggaaactcctggcacatgg

SEQ ID NO: 31357 - DNA, 260 bp, Unknown
  Description of Unknown: RightRegion for integrase B5358 sequence
atatttgattctatattatgggatggtaaaaagggctttaacattaaattaaacatataatttttaaaccgagttctaggtggtctgaacatccagcccagtataaattccattaattatttaattttcaagtataaaaatacctattatttccttaatgcatatttgtagaaaacgtgagtcagtatttattactggctcattctttttgcgtaatattattttttaatattgttacgcaaatattacgtttcttgtga

SEQ ID NO: 31358 - DNA, 260 bp, Unknown; identical to SEQ ID NO: 31314
  Description of Unknown: RightRegion for integrase B5359 sequence

SEQ ID NO: 31359 - DNA, 260 bp, Unknown
  Description of Unknown: RightRegion for integrase B5360 sequence
aagtgtaaaaaaggtagtggtgaggattattttgaattagaaattacactaaatatataattattatgtatagcattgatgtgcatatgaataagttcgttgatgctatacataataatagctagagaatataatttccctagctatttttattacatcattattaatacagcacttgctactccaattcctaagtatgcaatgcgccctgctacttctaagataattttattcatacgcctacctcctgtttattaaga

SEQ ID NO: 31360 - DNA, 260 bp, Unknown
  Description of Unknown: RightRegion for integrase B5361 sequence
aaatgtaaaaaaggtagcgatgaggactattttgaactagaaataacactaaatatataattattatttacagcatcaatgagcaaatgaataggctcgttaatgctatacataaaaatagctagagaattaactctagctattatcttgcaagtagtcacttaatattttattaattaaatttgtatattgctagaagtgaaaaaataatataaaatagaaaaaagagaactacattctattggcttttgagtggtttt

SEQ ID NO: 31361 - DNA, 260 bp, Unknown
  Description of Unknown: RightRegion for integrase B5362 sequence
tccgcccagcaggcgataagtactctcaaatatatggttgatggtgaggtttatttttgagtaataatcactttttcaaccgtactatagtaagaaagttaggtaagtacaataaaattatctatcctgaacgaagcgtcctgagctatggttttactatagggactgccaatggatgctggcgttctcgttctagcagttcaacaatacccaatcacaaaacaattcactgataacaaactttgtgcacgtgcttggtt

SEQ ID NO: 31362 - DNA, 260 bp, Unknown
  Description of Unknown: RightRegion for integrase B5363 sequence
agtcacattgacgtagatttttatttggccgaaaatccaggaatgcccgcaaacctttgatttatgcgggtttgctggcatctatacgcactagcaatttggttgacacaatggggatcctgctccttaggccagcagggctacagccctattgagatccttcgctattactacggtgacagcatctatatcaacacagcggaacagattgccgggatccctgcttcctggccgggctatgacctgacagtgggaagttc

SEQ ID NO: 31363 - DNA, 260 bp, Unknown; identical to SEQ ID NO: 31317
  Description of Unknown: RightRegion for integrase B5364 sequence

SEQ ID NO: 31364 - DNA, 260 bp, Unknown
  Description of Unknown: RightRegion for integrase B5365 sequence
agtcacattgacgtagatttttatttagctgaaaatccagaaatgccagcaaacccttgatttatgcgggtttgctggcatctatacgtactagcaatttggatgacacaatggggatcctgctccttaggccagcagggctacagccctattgagatccttcgctattactacggtgacagcatctatatcaacacagcggaacagattgccgggatccctgcttcctggccgggctatgacctgacagtgggaagttc

SEQ ID NO: 31365 - DNA, 260 bp, Unknown
  Description of Unknown: RightRegion for integrase B5366 sequence
gaagctgcgggcgggtgttcggctcagctcccgccatctccaccacgaaagtcaggttaaaataaatgcaggtttgcatttgctttaacctgacttttttgttatactgcaatcaaggttatttatataatatacggaatacagagcaatcatttaaaattctagaggaagaacagtgtttagagagatattaacagaattaattaaagataacgaatgggcaaagttgcaaaaaccgtgtgatgagagtgaacttgcta

SEQ ID NO: 31366 - DNA, 260 bp, Unknown
  Description of Unknown: RightRegion for integrase B5367 sequence
ttccgaaatgataatccagccgattttttgtctttggactttttcccggtgcttgaataatgcaaaacaaaggtatgatcagtgtcttgatgaattacatcattgatcatacctttattattcgcttacttccagccgtcgatcagcgcttttacttccgccgttttcgcgatctgatcgttgtggatcgcttcccatgcggcgatcatgccgttggtatactccggattgcgcttgtaatcgtcgctggtcttcgcggt

SEQ ID NO: 31367 - DNA, 109 bp, Unknown
  Description of Unknown: RightRegion for integrase B5368 sequence
gatttcacgggcaatgcacctgccttacagctcgtacagctcggtgtatttcttctttaaataatcggtgaagtggtgcgggtcgaacttgccgccgcagaggctctcg

SEQ ID NO: 31368 - DNA, 260 bp, Unknown
  Description of Unknown: RightRegion for integrase B5369 sequence
aaaagtaaaaaaggtagcaatgaggactattttgaattagaaataacactaaatatataattattatgtatagcattgatgtgcatatgaataggctcgttgatgctatacataaaataagctagagaatataatttccctagctattttttatttattatctggaatgtattccattatatctccaggttgacaatctagctctttgcatattgtttctataattttcaaagatacatattcatttttagaaatcttag

SEQ ID NO: 31369 - DNA, 260 bp, Unknown; identical to SEQ ID NO: 31319
  Description of Unknown: RightRegion for integrase B5370 sequence

SEQ ID NO: 31370 - DNA, 260 bp, Unknown; identical to SEQ ID NO: 31317
  Description of Unknown: RightRegion for integrase B5371 sequence

SEQ ID NO: 31371 - DNA, 260 bp, Unknown
  Description of Unknown: RightRegion for integrase B5372 sequence
ttccgaaatgataatccagccgattttttatctttggactttttcccggtgcttgaataatgcaaaacaaaggtatgatcagtgtcttgatgaattacatcattgatcatacctttattatttgctcatttccagccgtcgatcagcgcttttacttccgccgttttcgcgatctggtcattgtggattgcttcccacgcggcgatcatgccgttggtatactccggattgcgcttgtaatcgtcgctggtcttcgcggt

SEQ ID NO: 31372 - DNA, 260 bp, Unknown
  Description of Unknown: RightRegion for integrase B5373 sequence
tccgcccagcaggcgataagtgctctcaaatatatggttgatggtgagatttatttctaaataatgatctcggattttaagttatgctatggtgataaagtgcaagacagaattaattatctttgacgaaacttaatgggtaattactttgtttgctcccacaagcgagttttgtacggctgtattggggtagtaaatgagctatacaatcttaatcatttgtcaggtgagaactcttggtcgcagattcaaatactgaa

SEQ ID NO: 31373 - DNA, 260 bp, Unknown
  Description of Unknown: RightRegion for integrase B5374 sequence
gcaacaccaaatcatggcgatgattctaagaatataaagcttgaaataatacttaaataattttttacctaacatacacaccatcgtgtgactgattcataagtaccacggtggtgtgtatattttatttcttaactatgattcagcttttcctctccttatttaatatatgcaacattatacataaaaagatagcttttacactatctttatttaaacacctttcttgtttcatcatcgtttaaatcacaatccacgtt

SEQ ID NO: 31374 - DNA, 260 bp, Unknown
  Description of Unknown: RightRegion for integrase B5375 sequence
gatgatacgaatggtaaatattgtgttccaaaattaaagcttaatattattttatattagtctttaaataagttgtttgtctgctactatttgggcaaatatcaaaaaagtttattatggaaacacagctaaagatgctgataaaattggttttagagatgatttcatctacaactatattgaaggaaaatgccaagatatctccgttttagatttagaacagtttggtagagatatcactataaaatcctttgataact

SEQ ID NO: 31375 - DNA, 260 bp, Unknown
  Description of Unknown: RightRegion for integrase B5376 sequence
aagtgtaaaaaaggcagcaatgaggattactttgagttagaaattacactaaatatataattattatgtatagcattgatgtgcatatgaattagctcgttaatgctataaataaaataagctagagaatataatttccctagctattttttatttattatttccctacatcattatcaatatagcacttgctactccaattcctagatatgcaatgcgccctgttatctccagcattatttttttcatagtcattacct

SEQ ID NO: 31376 - DNA, 260 bp, Unknown
  Description of Unknown: RightRegion for integrase B5377 sequence
gatcagcatgagctggagtttcatttgatcggcggattgaaattcaaagaaaacatataacagaaaatgccttgcagtaaaattgcagggcatatttttgttggttttggtactggatttccacagaattttgtagtattgttgtacacggaggtgaaattagatggcaagaaacagagtaatcccgttcggctactgcatgaaaaacggcgaaataacgaccgaaccaaaagaagtttatgcagttgcagagattttca

SEQ ID NO: 31377 - DNA, 109 bp, Unknown
  Description of Unknown: RightRegion for integrase B5378 sequence
acgagcggtgaagtgttcggacgctgtgcgcaaagtcctgccaaaagaccgtcagtgtaaagctgacggtctttttgtatttatatatcgaaaaatctccggcaagcaa

SEQ ID NO: 31378 - DNA, 260 bp, Unknown
  Description of Unknown: RightRegion for integrase B5379 sequence
agcgttagaggaaaaggacatgaagaagaatttgaattacaaattaacattaaattataaaaattatcgtgtgggtaccaattcttcagtaccaatatcagttaaaagcgcctttcctctattatctggcattgtatatctttgatttaaataacgaagtgctgctcctagttctccgccaaagccaccatattgagtaactaattgtttagcaaaagctaaattctttttcttaattgaaacaggatactgtaatcttt

SEQ ID NO: 31379 - DNA, 260 bp, Unknown
  Description of Unknown: RightRegion for integrase B5380 sequence
caacgtgggacggatgatgtacagattaagatttaccctgtgttgtcatcgtgtaagtgatgactgagctatccatacacgttgtcaacgcctgccaagtagacatgacttgatgtcccaccctttgtttctcctgtccataaaagtatgataactgacgccgtagtgttgtgccatctctctgtaagacttatattcattaccaaggtgatctacaaccacacgcttaactagtgcaatctcaagactgtcaccgtttt

SEQ ID NO: 31380 - DNA, 260 bp, Unknown
  Description of Unknown: RightRegion for integrase B5381 sequence
agcgttagaggaaaaggacatgaagaagaatttgaattacaaattaacattaaattataaaaattatcgtgtgggtaccaattcttcagtaccaatatcagttaaaagagcctttcctctattatctggcattgtatatctttgatttaaataacgaagtgctgctcctagttctccgccaaaaccaccatattgagtaactaattgtttagcaaaagctaaattctttttcttaattgaaataggatactgtaatcttt

SEQ ID NO: 31381 - DNA, 260 bp, Unknown
  Description of Unknown: RightRegion for integrase B5382 sequence
cagtcgctttctgaggtcactgagaggggtttaatagatgttgatgaggttatcatatagttgagattctatcgtcagtagcgcttgttggggttcacagaaagcttcttcaaagtactacctgtaccagcattactaagcacctttgaagcttgctcattagcggcatctgagaaggtgctttttccattctcaactttgacacttttaccacaattgatacgggcttgaagttgctcattagtgagttcactcgtaga

SEQ ID NO: 31382 - DNA, 260 bp, Unknown
  Description of Unknown: RightRegion for integrase B5383 sequence
ataataaacgaaattcatttacttgataatagtaaattcaagataaaattcaatctataataggcataaatttaaactgggcaggatgttctatccagtttaaatttatgctaataaataaaactgattatctacataactttttataaggaacaatggaaacagaatttctctatatattatattacgtgtattaggcgtataggcgtatatacgtatatgcctaattatacaaatattacttataaataaatttttgt

SEQ ID NO: 31383 - DNA, 260 bp, Unknown
  Description of Unknown: RightRegion for integrase B5384 sequence
cagtcgctttctgaagtcactgagagggggttgatagatgttgatgaggttatcatatagttgagattctatcgtcagaatcgcttgttaggattcacagaaaatttcttcaaagtactacctgtaccagcattattaagcacctttgaagcttgcgcattagcggcatctgagaaggtgctttttccattctcaactttgacacttttaccacaattgatacgggcttgaagttgctcattagtgagttcactcgtaga

SEQ ID NO: 31384 - DNA, 260 bp, Unknown
  Description of Unknown: RightRegion for integrase B5385 sequence
ctccgtcttgaccgtgatactcccccctccctcacactttacctgaactgggaggattgatttttttggggaatgtaatatagtaaatcggacttatgaataagtacgattaactatattttcacttttccccaagtattccactgaactccaaccctctgcaccggtgccgatgagcgggcacaggcatccgctcccgcctatgggagaataagcgatgtcgtttcagtttctcttttccctgcgtatctaccaggcca

SEQ ID NO: 31385 - DNA, 109 bp, Unknown
  Description of Unknown: RightRegion for integrase B5386 sequence
gaaagaatgtgctaccgtaagcagacctctgacttggcgttgcacgttgaatttttgtaactatttatgtacaagtgagatataatgtctttttttcatagatccacat

SEQ ID NO: 31386 - DNA, 260 bp, Unknown
  Description of Unknown: RightRegion for integrase B5387 sequence
ataataaccgaaattgatttacttgataatggtaaattcaagataaaattcaatctataatagacataaatttaaactgggcaggatgtgcagctgctattagtgcaaaaaaagcaggagcagaagttcatatatatgaaaaaacagatttattacttggacttggaaatgttggcggcataatgagaaataacggaagatatactgcatctgaagaacttattgctttaggtggcggagatttaatcaatattaccgat

SEQ ID NO: 31387 - DNA, 260 bp, Unknown
  Description of Unknown: RightRegion for integrase B5388 sequence
cagtcgctttctgaagtcactgagaggggtttaatagatgttgatgaggttatcatatagttgagattctatcgtcagtatcgcttgttaggattaacagaatacttcttcaaagtactacctgtaccagcattattaagcacctttgaagcttgcgcattagcggcatctgagaaggtgctttttccattcttaattttgacacttttaccacaattgatacgggcttgaagttgctcattagtgagttcactcgtaga

SEQ ID NO: 31388 - DNA, 90 bp, Unknown
  Description of Unknown: RightRegion for integrase B5389 sequence
ggaaacctatataacaacaactttaccgtagatatatttccatcgttgcctcagatctaatacttatatcacaaatggttgtatgtatat

SEQ ID NO: 31389 - DNA, 260 bp, Unknown
  Description of Unknown: RightRegion for integrase B5390 sequence
caggagaagtgttcggataaattgctatcatctccaccaagatatgataaatccgcataagcaagctgtttatgcggatttatttttgtttatccccgaaaaatccccgaattattcaagcttcaatataatttcatcaagtacagcgacagctctttcctcctcacgaggatacaaatgtgaatatgtattccaagtcatttcaacatcagaatgaccaagccttctggcaacttcttgaatgttaattccctcgttcg

SEQ ID NO: 31390 - DNA, 79 bp, Unknown
  Description of Unknown: RightRegion for integrase B5391 sequence
aggtattggacgaacacttatttcttcagcggcggcttcgccgtaaagtgttcgctctgatccacaacagaaaagcgcc

SEQ ID NO: 31391 - DNA, 260 bp, Unknown
  Description of Unknown: RightRegion for integrase B5392 sequence
tcggatttcgcttccaatgcaccggcaaggaagtcccgaaaaacgttggtgcataattgaagcaaccaagcctttcccaataataggtctgatttttctcatcaaaggctgcatactcccgtatctgctctgctgttacaggaagatactccataatcagactttcgaactcttccttcggaatgccatttggataatcttcagaattgaacttttcaccatatttcattccatacaggtgttcaaacattccgttataa

SEQ ID NO: 31392 - DNA, 94 bp, Unknown
  Description of Unknown: RightRegion for integrase B5393 sequence
aaagaagtaagtgttcgtattatgaacgattggtggagacaagcgggatcgaaccgctgacctcttgaatgccattcaagcgctctcccagctg

SEQ ID NO: 31393 - DNA, 260 bp, Unknown
  Description of Unknown: RightRegion for integrase B5394 sequence
aggtattggacgaacacctatttctttagcggaggcttcgccgtgaagtgttcgctctgatccacaacagaaaagcgccgtcttgggaagaatcccaagacggcgcttttttatatttctgaagcgttctaaaacttcacaacagggttattttggaatatgtttatcaacggaatgctaccgttttcggctttttatgatataatatgaatacaccataaaatcaagaagggataacaatgccaatgtatttgaagcgc

SEQ ID NO: 31394 - DNA, 260 bp, Unknown
  Description of Unknown: RightRegion for integrase B5395 sequence
cagtcgctttctgaagtcactgagaggggtttaatagatgttgatgaggttatcatatagttgagattctatcgtcagtatcgcttgttaggattaacagaatacttcttcaaagtactacctgtaccagcattattaagcacctttgaagcttgctcattagcggcatctgagaaggtgctttttccgttcttaactctgacatttttaccacaattgatacgggcttgaagttgctcattagtaagttcactcgtaga

SEQ ID NO: 31395 - DNA, 73 bp, Unknown
  Description of Unknown: RightRegion for integrase B5396 sequence
aagagttcttatttgaacaaaatggtgatccacccgggattcgaacccgggacaccctgattaaaagtcaggt

SEQ ID NO: 31396 - DNA, 260 bp, Unknown; identical to SEQ ID NO: 31378
  Description of Unknown: RightRegion for integrase B5397 sequence

SEQ ID NO: 31397 - DNA, 73 bp, Unknown
  Description of Unknown: RightRegion for integrase B5398 sequence
ttcgacgagggactcgtcagctccaccataacgcgcaaagacgaactctttatattgtgaagaacgtctttgc

SEQ ID NO: 31398 - DNA, 260 bp, Unknown
  Description of Unknown: RightRegion for integrase B5399 sequence
tttaaaccgcattgtatagccaaaaatggcttaacagtgcggtttttctttatcctgtaactgcatgagactacatgagaaagcatgatttttgacacagaaaatacacagtaattacacaggaagaaattaccaattttaaaggcgtttactataataaagcggccccgtatcgctacggagccgcccggatattataccctctttggataggctattcagtttgtttactcataatgcagcgcctttgcccggctgcg

SEQ ID NO: 31399 - DNA, 260 bp, Unknown
  Description of Unknown: RightRegion for integrase B5400 sequence
cagtcgctttctgaagtcactgagaggggtttaatagatgttgatgaggttatcatatagttgagattctatcgtcagtatcgcttgttaggatttacagaaaatttcttcaaagtactacctgtaccagcattactaagcactttcgaagcttgctcattagcggcatctgagaaggtgctttttccgttctcaactttgacacttctaccacaattgatacgggcttgaagttgctcattagtgagttcactcgtaga

SEQ ID NO: 31400 - DNA, 260 bp, Unknown
  Description of Unknown: RightRegion for integrase B5401 sequence
tctataattgacagtgtttacattacagaaaacgatattaaagttatatttaaagagtaagtagttttacctcactaaaacaattatcaactattgacaatcactgttttttctgttaatgtaaaagctaacggagtttaatttagaacttctacactattttatacataaagaatactcgtaaagtgtaaatcagagaataccaccaaacctatggtagtattctctattttatcggaggaaattgatatgattcgcac

SEQ ID NO: 31401 - DNA, 260 bp, Unknown
  Description of Unknown: RightRegion for integrase B5402 sequence
cagtcggatttcaacctcaatgcaccaaaatcaattcccgataattttctatctctgtgacagacatcgcatctcttcctttccgttccggcggtcttgccgccgctgtttcccggaagggaatggaatcggtacttgatccataagtaattgatttttctgtatttgatttctctatatttaattctgcgggcttttccgtatccggttttaccatatccgggttttccgtatctggtgaaaccacatctgacggcagc

SEQ ID NO: 31402 - DNA, 260 bp, Unknown
  Description of Unknown: RightRegion for integrase B5403 sequence
cagtcgctttctgaagtcactgagaggggtttaatagatgttgatgtagtagagatttagtattttttgtgagggttcactgagtactttttaagctttgaagctacccgaccagcgttactattagcattggtgacgttggttttttcagcttctgttaagtctgaatagtccagcttccaagccttattacacttaatctgagcatcgagaatatcatttctgatagctggagcgtaaccggatacatcgctaatact

SEQ ID NO: 31403 - DNA, 260 bp, Unknown
  Description of Unknown: RightRegion for integrase B5404 sequence
gaaaaaggaattagaaatggtaaatttgaacttgatataaaattaagattaccaatatagttttttactgttatggtcatactgacaaacaataatccatatgaccataacagttaggaaatatatagtataaatagaataaaatagattaaatgttaaatatgtgttaaatattctataaaaggaatattctacatattaaaaatcatatatttcattaagacttttgaaaattgagaaagttgagatgaaataattta

SEQ ID NO: 31404 - DNA, 109 bp, Unknown
  Description of Unknown: RightRegion for integrase B5405 sequence
ggacgttgggatcctgatgcgataaagcaatttaagttagaaatatatttaaaggtgtaataagtcacattataacctacatcatttatgggctaattcttcagtacca

SEQ ID NO: 31405 - DNA, 260 bp, Unknown
  Description of Unknown: RightRegion for integrase B5406 sequence
atgtcagcgcacggttcggattgtctattgtatggggagccactgttaaatgttccttgaactgttgttcgaggaactttttttgccttttttagcccgccatatgtgtcgccatatgtataaggggaggggaatgtatatgtgcggtatgatactggctgctatttgggtgcttgttgtctctacattactctcgcttgtgctgtttactttgggcagcagtgttcatatacgctctggaggcggcggacttttgccgt

SEQ ID NO: 31406 - DNA, 109 bp, Unknown; identical to SEQ ID NO: 31404
  Description of Unknown: RightRegion for integrase B5407 sequence

SEQ ID NO: 31407 - DNA, 260 bp, Unknown
  Description of Unknown: RightRegion for integrase B5408 sequence
ctttacactgcacccggagctgtgatcctgtcatgcagcaggtcagcggctagcttttaaagcccagaccagagctctctcgtactctgtcagcggcagccccggaactcagcaaagcagataattatattttagtacatgctgaaatacttcgccaccttgtgcgccggcgcatccggatcgcagatgaagtcatgcgccagatcgaagtagaagtctggcgtgtctacctggtacttttccaccgtcctccgtgagtc

SEQ ID NO: 31408 - DNA, 71 bp, Unknown
  Description of Unknown: RightRegion for integrase B5409 sequence
tcgcatttcagcgtattggtgggcccacctgggatcgaaccagggaccgaccggttatgagccggttgctc

SEQ ID NO: 31409 - DNA, 260 bp, Unknown
  Description of Unknown: RightRegion for integrase B5410 sequence
gacaacggaacgaggtgggggaagaaccagtacagactggatatttttttgaaaaattgattaccatgatattggaacatacgaatctgttccatgatgatagttatatattgacttcaacagaaaaaccaccggcaagcggtggttttttctgtgaagtgtgtgtgtatactcgtacgaaagataggatttctacattattattatacctctgatgtttttatgcgtcaagaaaatactttgctactttgtatttcttt

SEQ ID NO: 31410 - DNA, 260 bp, Unknown
  Description of Unknown: RightRegion for integrase B5411 sequence
gataaatccaaaggatgcaaatctaaattatccttaaaaattgtttttgtttttaaataaaaaagagatgtacttttaatgttttatcatcaaaagtacatcttctttaagtttattctttattgtctaatcctattttagatagtatataaaatgtgatacttagaatcatgccacagacaacagcaaggcccataccttttaattgtacaggaccaatatttacagcagctccactaagaccacttatcatagttacg

SEQ ID NO: 31411 - DNA, 260 bp, Unknown
  Description of Unknown: RightRegion for integrase B5412 sequence
tttgaagacggggaggagttcggatgccgtgcgtctcgctccaccataagtccaccgtaattctgatagaattacggtgggctttttctatgcccgaaaaccgcttgaaatagggcttttcggctgttcaggctcataaacgaaccccgctgcagagtaattatgcggcggggaatcgtgcgttttaggaggattgcagctttctgctctgccgtaatcgttaaacagccgagtattcgttgaactgctgagggtaatcg

SEQ ID NO: 31412 - DNA, 109 bp, Unknown; identical to SEQ ID NO: 31404
  Description of Unknown: RightRegion for integrase B5413 sequence

SEQ ID NO: 31413 - DNA, 260 bp, Unknown
  Description of Unknown: RightRegion for integrase B5414 sequence
atgtcagcgcacggttcggattgtctattgtatggggagccactgttaaatgttccttgaactgttgtttgaggaactttttttgcccgccatatgtgtaaggggaggggaatgtatatgtacacgggatgatgctggctgccactcatccccctcgccgcttacagtttacttcggttaaaagtgtttatatacgttctggagcggcaagtctcttctgttcgccgccggataaggcggcgccattttcgaaatcatta

SEQ ID NO: 31414 - DNA, 260 bp, Unknown
  Description of Unknown: RightRegion for integrase B5415 sequence
gacgatggtactcgtttcggaaaacatcaatacaggttagatatttttttgaaagattaacctatatcatttaggcacacacgaacgtgtaccaggatgatataggtggacaaaaaacagaaagcaaggtcattaaccttgctttttcattcttcgaaactattataaatgttggatttttacgaaaaagcgtgccggggttttattcttaaatagcaatctactatagtagaaattaaaaaaattaagaaattcatcat

SEQ ID NO: 31415 - DNA, 260 bp, Unknown
  Description of Unknown: RightRegion for integrase B5416 sequence
acatcaatatttgaaattgctgaaaaagagctactagaaatagacgcttatcaactgtaattttcaggggctatgaagcccctttttatgtctcaataagtgcccttcttgttcggatttacagaaaacttccgtaaagcattacccgacttaagcacctttgaagcttgctcattagctgaggctgtgaaggtgctctcaccatttttaacgctaacgctcttagagcacgttacacgggcttttagcgcttcatctga

SEQ ID NO: 31416 - DNA, 260 bp, Unknown
  Description of Unknown: RightRegion for integrase B5417 sequence
atgtcagcgcacggttcggattgtctattgtatggggagccactgttaaatgttccttgaactgttgttcgaggaacttttttgccttttttagcccgccatatgtgtcgccatatgtataaggggaggggaatgtatatgtacacgggatgatgctggctgccactcattcccctcgctgcttacagtttacttcggttaaaagtgtttatatacgttctggagcggcaagtctcttctgttcgacaccggataaggcg

SEQ ID NO: 31417 - DNA, 109 bp, Unknown
  Description of Unknown: RightRegion for integrase B5418 sequence
gataaatccaaagaatgcaaatctaaattatccttaaaaattgtttttgttttcaaataaaaaagagatgtacttttaatgttttatcatcaaaagtacatcttcttta

SEQ ID NO: 31418 - DNA, 260 bp, Unknown
  Description of Unknown: RightRegion for integrase B5419 sequence
ggacgttgggatcctgatgcgataaagcaatttaagttagaaatatatttaaaggtgtaataagtcactttataacctacatcatttatgggctaattcttcagtaccaatatctgtcaataacgcttgaatttctggatatggcattgtatagcgttgagataaatatctaagtgccgctccaagctctccatcaggtccgcctaattggtcaataataactgccgctgcttttgcattcggtttagtaatgtttatag

SEQ ID NO: 31419 - DNA, 260 bp, Unknown
  Description of Unknown: RightRegion for integrase B5420 sequence
agaaagcctatcttagaactggctaaaataggctcttgtcaaatatggcaggggcagtaagattcgaactcacgacactcggttttggagaccgatgccaacacacactaatatactgtttttactttatattttatcggcattctgactttaaaattttgccattctgacttttgctttgctggcaagaacaaaaaaagaacagataattacctgcacagctccaattcctgccttaatttattcagccgacctatcca

SEQ ID NO: 31420 - DNA, 260 bp, Unknown
  Description of Unknown: RightRegion for integrase B5421 sequence
gacaatggaacgaggtggggaaagaaccagtacagactggatatttttttgaaaaattgattaccatgatattggaacatacgaatctgttccataatgatagttatatattgacttcaacagaaaaaccaccaacaagcggtggttttttctgtgaagtgtgtgtatacgtgaaaagcacgtgttttatatacctattatatagcagattcgtttatgcgtcaagaaaatacttcgctactttgtatttcttcccatca

SEQ ID NO: 31421 - DNA, 260 bp, Unknown
  Description of Unknown: RightRegion for integrase B5422 sequence
cgcagggaactgtgcagacagtttgttgagaaaattgatgttttcccagaggaaaggtaagatggcaggattctgaaaaagatcttctttcgttttcctgtttattatgagaatgaagagaaaagggcaggaaatgatgaacctgatgaagtggtgattttcgcagtggattgtacggagcatcgagtgacagcttctgaggcgaaagcgacttatgtggagatacgggcatatgtgaaagaaaagtatgatatgaatat

SEQ ID NO: 31422 - DNA, 260 bp, Unknown
  Description of Unknown: RightRegion for integrase B5423 sequence
tttgaagacggggaggagttcggatgccgtgcgtctcgctccaccataagtccaccgtaattttgatagaattacggtggactttttctatgcccaaaaaccgcttggaatcaggcttttcgaccgtttcagcacataagtgaaccccgccgcagagcgattctgcggcgggggtttgtgcgttttatagggattgcggttttctgctctgctgtaatcgttaaacagccgaataatcgttgaactactgggggtattcg

SEQ ID NO: 31423 - DNA, 109 bp, Unknown
  Description of Unknown: RightRegion for integrase B5424 sequence
gataaatccaaagaatgcaaatctaaattatccttaaaaattgtttttgtttttaaataaaaaagagatgtacttttaatgttttatcatcaaaagtacatcttcttta

SEQ ID NO: 31424 - DNA, 260 bp, Unknown
  Description of Unknown: RightRegion for integrase B5425 sequence
tcaccaatctttgaaattgctgataaagagctactggatattgacgcttatcaactgtaattttcaggggctatgaagcccctttttatgtctcaataagtgcccttcttattcggattcacagaaaacttccgtaaagcattacccgacttaagcacttttgaagcctgctcattagctgaggctgtgaaggtgcttacaccatctttcaccgtgacatttttagagcaattgctacggacccttagcgcttcatcaga

SEQ ID NO: 31425 - DNA, 109 bp, Unknown; identical to SEQ ID NO: 31423
  Description of Unknown: RightRegion for integrase B5426 sequence

SEQ ID NO: 31426 - DNA, 260 bp, Unknown
  Description of Unknown: RightRegion for integrase B5427 sequence
ggacgttgggatcctgatgcgataaagcaatttaagttagaaatatatttaaaggtgtaataagtcatattataacctacatcatttatgggctaattcttcagtaccaatatctgtcaataacgcttgaatttctggatatggcattgtatagcgttgagataaatatctaagtgccgctccaagctctccatcaggtccgcctaattggtcaataataactgccgctgcttttgcattcggtttagtaatgtttatag

SEQ ID NO: 31427 - DNA, 260 bp, Unknown
  Description of Unknown: RightRegion for integrase B5428 sequence
acatcaatctttgaaattgctgataaagagctactagaaatagacgcttatcaactgtaactttcaggggctatgaagcccctttttacgtcttaataagtaccgcgcttattagggttcacactgtacttcttcaaagtgctactaagcgcctttgtagctccagcattagcggagtctgtgaaggtactttcaccattttttaccgtaacattcctagaacaattcagacgggcttttaactgttcgtcggtaagttc

SEQ ID NO: 31428 - DNA, 260 bp, Unknown
  Description of Unknown: RightRegion for integrase B5429 sequence
tcaccaatctttgaaattgctgataaagagctactggatattgacgcttatcaactgtaattttcaggggctatgaagcccctttttatgtctcaataagtgcccttcttattcggattcacagaaaactttcgtaaagcattacccgacttaagcacctttgaagcttgcgcattagctgagtctgtgaaggtactttcaccattcttaacactaacgttcttagaacatgctacacgggcttttaacgctccatctga

SEQ ID NO: 31429 - DNA, 75 bp, Unknown
  Description of Unknown: RightRegion for integrase B5430 sequence
acggagcataaacagcccacaagaaagaaaaagaaaccaaaatccaaagaaacgaggtaaacagctatgagtatt

SEQ ID NO: 31430 - DNA, 260 bp, Unknown
  Description of Unknown: RightRegion for integrase B5431 sequence
gaaagagggaatagaaaaggtaaatttgagttagatattaaattaaagttacctgtataataattcctaactgttattatgaatctgataaacaataatctgtatgactataacagttacccaaatattaatgtaaatagaatttaatagattaaatgttaaaaataagttaaataggaatatttttataatgaaaaatcatacactgtactagtgcattatctaaacgcagtggtttacagctcgctggaaatagtata

SEQ ID NO: 31431 - DNA, 260 bp, Unknown
  Description of Unknown: RightRegion for integrase B5432 sequence
acatcaatatttgaaattgctgaaaaagagctactagaaatagacgcttatcaactgtaattttcaggggctatgaagcccctttttatgtctcaataagtgcccttcttgttcggatttacagaaaacttccgtaaagcattacccgacttaagcacctttgaagcttgctcattagctgaggctgtgaaggtgctctcaccatttttaacactaacgctcttagagcacgttacacgggcttttagcgcttcatctga

SEQ ID NO: 31432 - DNA, 260 bp, Unknown
  Description of Unknown: RightRegion for integrase B5433 sequence
tcaccaatctttgaaattgctgataaagagctactggatattgacgcttatcaactgtaattttcaggggctatgaagcccctttttatgtctcaataagtgcccttcttattcggattcacactaaatttccgtaaagcattacccgacttaagcacttttgaagcctgctcattagcggcatctgagaaggtgctttttccgttctcaactttgacacttctaccacaattgatacgggcttgaagttgctcattagt

SEQ ID NO: 31433 - DNA, 109 bp, Unknown; identical to SEQ ID NO: 31404
  Description of Unknown: RightRegion for integrase B5434 sequence

SEQ ID NO: 31434 - DNA, 76 bp, Unknown
  Description of Unknown: RightRegion for integrase B5435 sequence
aagagttcgaatttgaatggtatggtgatccacccgggattcgaacccgggacaccctgattaaaagtcaggtgct

SEQ ID NO: 31435 - DNA, 260 bp, Unknown
  Description of Unknown: RightRegion for integrase B5436 sequence
tacgatggtactcgtttcgggcaacatcaatacaggttagatatttttttgaaagattaacctgtatcatttaggtactgacgaacgtgtaccagaatgatataggtaaaagacaaactaaaaagcaaggtcagttgccttgctttttcatttttcgaaactattataaaggattcttacataaaagcgtgccggggttttattcttaaatagcaatctactatagtagaaattaaaaaaattaagaaattcatcataca

SEQ ID NO: 31436 - DNA, 260 bp, Unknown
  Description of Unknown: RightRegion for integrase B5437 sequence
acatctatctttgaaattgctgaaaaagagctactagaaatagacgcttatcaactgtagcaatcaggggctatgaagcccctttttatgtctcaataagtgcccttcttgttcggattcacagaaaacttccgtaaagcattacccgacttgagtacctttgcagcacctgaattagctgagtctgtgaaggtgcttacaccatctttcaccgtgacatttttagagcaattactacgggcttttaatgcttcatcaga

SEQ ID NO: 31437 - DNA, 260 bp, Unknown
  Description of Unknown: RightRegion for integrase B5438 sequence
tcaccaatctttgaaattgctgataaagagctactggatattgacgcttatcaactgtaattttcaggggctatgaagcccctttttatgtctcaataagtgcccttcttgttcggattcacagaaaacttccgtaaagcattacccgccttgagtacctttgcagcacctgaattagctgagtctgtgaaggtactttcaccattcttaacactaacgttcttagaacatgctacacgggcttttaacgcttcatctga

SEQ ID NO: 31438 - DNA, 260 bp, Unknown
  Description of Unknown: RightRegion for integrase B5439 sequence
ctttacactgcacccggagctgtgatcctgtcatgcagcaggtcagcggctagcttttaaagcccagaccagagctctctcgtctcgtactctgtcagcggcagctccagctcgccgtcttcgtaaagggcgagttctgcgctggtcagctcgacctcgaacactctgaaggtacctaccgcgtcttcctggtagctgcgctggtcgcggtagctcaagcgatcccactcgcctcgcgcgagcttgacagcgtctgccgc

SEQ ID NO: 31439 - DNA, 260 bp, Unknown
  Description of Unknown: RightRegion for integrase B5440 sequence
gacaatggaacgaggtggggaaagaaccagtacagactggatatttttttgaaaaattgattaccatgatatcggaacatacgaatctgttccatgatgatagttatatattgacttcaacagaaaaaccaccggcaagcggtggttttttctgtgaagtgtgtgtgtatactcgtacgaaagataggatttctacattattattatacctctgatgtttttatgcgtcaagaaaatactttgctactttgtatttcttt

SEQ ID NO: 31440 - DNA, 109 bp, Unknown; identical to SEQ ID NO: 31417
  Description of Unknown: RightRegion for integrase B5441 sequence

SEQ ID NO: 31441 - DNA, 260 bp, Unknown
  Description of Unknown: RightRegion for integrase B5442 sequence
tcaccaatctttgaaattgctgataaagagctactggatattgacgcttatcaactgtaattttcaggggctatgaagcccctttttatgtctcaataagtacccttcttattcggattcacagagtactttcgcagagcattacccgacttaagcacctttgaagcttgctcattagctgaggctgtgaaggtgctctcaccatttttaacgctaacgctcttagagcacgttacacgggcttttagcgcttcatctga

SEQ ID NO: 31442 - DNA, 260 bp, Unknown
  Description of Unknown: RightRegion for integrase B5443 sequence
ccttctgaccctacggataaatgccgtcttgttatcaccctaaagccagtattcttctagctttatctgtattttatatcttgtatagtgtctttctccacaactgtcatatattcgttgggcatcaatacaaatagattccttagggttgcaagtggtatgttcaccaaaaggactttctgccataagtaaaacctccatacatagtgaaacttttgtttccgtcattgacggtgtaacactatatcatatggaggttt

SEQ ID NO: 31443 - DNA, 260 bp, Unknown
  Description of Unknown: RightRegion for integrase B5444 sequence
ttgtcggatttcgcttccaatgcacctgcacggccacctgtggtatatgcaaatgcatagaaaagacggagcgcatggtgcagattcatacacgtgatgaagccgtgacagccgcgtgacaaaccgcgaacgtggcactttaattcgctacccagcaaaggcgaatccgacaattgtgcaaaacctgtggattacgcgaacgcatacgccgtcccgagcgggacagattgcgcgccgctgtggaaaacgttcgccggaat

SEQ ID NO: 31444 - DNA, 75 bp, Unknown
  Description of Unknown: RightRegion for integrase B5445 sequence
aagagttcgaatttgaatggtatggtgacccaagagggattcgaacccccgacaccttgattcgtagtcaagtgc

SEQ ID NO: 31445 - DNA, 260 bp, Unknown
  Description of Unknown: RightRegion for integrase B5446 sequence
gacaatggaacaaggtgggggaagaaccagtacagactggatatttttttgaaaaattgattaccatgatatcggaacatacgaatctgttccatgatgatagttatatattgacttcaacagaaaaaccaccggcaagcggtggttttttctgtgaagtgtgtgtgtatactcgtacgaaagataggatttctacattattattatacctctgatgtttttatgcgtcaagaaaatactttgctactttgtatttcttt

SEQ ID NO: 31446 - DNA, 70 bp, Unknown
  Description of Unknown: RightRegion for integrase B5447 sequence
tcgcatttcaaagtattggtgggcccacctgggatcgaaccagggaccgaccggttatgagccggttgct

SEQ ID NO: 31447 - DNA, 260 bp, Unknown
  Description of Unknown: RightRegion for integrase B5448 sequence
gacgatggtactcgtttcgggcaacatcaatataggttagatatttttttgaaagattaacctatatcatttaggtactgacgaacgtgtaccatgatgatatacgtaaatggcaaataaaaaaacagggctgattgccttgcttttttattgttgatacttcattaaaaattgtttcaactcacaacaccatataacgtgacttggcttctgccatttttttcaacaatacacaatacattgattacgtttcaactcac

SEQ ID NO: 31448 - DNA, 74 bp, Unknown
  Description of Unknown: RightRegion for integrase B5449 sequence
gagtgttcgaacgatgatgttctggtggatcatcaggggttcgaaccccggacaccctgattaagagtcaggtg

SEQ ID NO: 31449 - DNA, 158 bp, Unknown
  Description of Unknown: RightRegion for integrase B5450 sequence
tttgaagacggggaggagttcggatgccgtgcgtctcgctccaccataagtcaaccgtaattttgatagaattacggttgactttttctatgcccaaaaaccgtttgaaatagggcttttcggctgttcaggctcataaacgaaccccgctgcaggca

SEQ ID NO: 31450 - DNA, 109 bp, Unknown
  Description of Unknown: RightRegion for integrase B5451 sequence
cataagagacgtgatgaatatgactttgatatagttttatatcctaagttgcctcattagactattgtattttcaatagtcttttattaatgttataaacaaactgata

SEQ ID NO: 31451 - DNA, 260 bp, Unknown
  Description of Unknown: RightRegion for integrase B5452 sequence
ggacgttgggatcctgatgcgataaagcaatttaagttagaaatatatttaaaggtgtaataagtcacattataacctacatcatttatgagctaattcttcagtaccaatatctgtcaataacgcttgaatttctggatatggcattgtatagcgttgagataaatatctaagtgccgctccaagctctccatcaggtccgcctaattggtcaataataactgccgctgcttttgcattcggtttagtaatgtttatag

SEQ ID NO: 31452 - DNA, 260 bp, Unknown
  Description of Unknown: RightRegion for integrase B5453 sequence
tttgaagacggggaggagttcggatgccgtgcgtctcgctccaccataagtccaccgtaatttcgatagaattacggtggtcttttttaacgcagtgcaagtaattaaatctgcatacagggggcgcagtttcatgagtgaggtgcaattccatatccatcggaaatccgcatttgcgggagttcttttgccgtatcatatgtacattaacggtcagcgcattggaacaatacgcaacgggaaatcactgaatgcaaacg

SEQ ID NO: 31453 - DNA, 260 bp, Unknown
  Description of Unknown: RightRegion for integrase B5454 sequence
ccttctgattctacggataaatgccgtcttgttattaccctaaagccagtattcttctagctttatctgtgttttatatcttgtatagtgtctttctccacaactgtcatatattcgttgggcatcaatacaaatagattccttagggttgcaagtggtatgttcaccaaaaggactttctgccataagtaaaacctccatacatagtgaaacttttgtttccgtcattgacggtgtaacactatatcatatggaggttt

SEQ ID NO: 31454 - DNA, 260 bp, Unknown
  Description of Unknown: RightRegion for integrase B5455 sequence
tcggaggggtgttcatccttgagcacccctgctccaccaagatatgataaatccgcataagcaagctgtttatgcggatttatttttgtttatccccgaaaaatccccgaattattcaagcttcaatataatttcatcaagtacagcgacagctctttcctcctcacgaggatacaaatgtgaatatgtattccaagtcatttcaacatcagaatgaccaagccttctggcaacttcttgaatgttaattccctcgttcg

SEQ ID NO: 31455 - DNA, 260 bp, Unknown
  Description of Unknown: RightRegion for integrase B5456 sequence
cttatacataaaatattcatatgtgaggacggcacctgtgaagttgtgtggaatatataataaaaagcacctattttcgattatgaaaataggtgcttaattttataaatatctgcctgtaatactttttttgttcaattttatttcatgcggtgttccgcttgcaatgattttaccgccgttttcaccgcctccgggtcccatatctataacataatcggcattgcgaattacgtcaaggtcatgttcaataacgatta

SEQ ID NO: 31456 - DNA, 260 bp, Unknown
  Description of Unknown: RightRegion for integrase B5457 sequence
aaaaagaacggaccatacaacaacttccagatcgttgtacaccctcgtattccggtataatttattacttacaccctcttggcacgggttcctcggtgccaatatccgtaagcattccgatcacccgtttatccggcattgcataccgttgtgataaatatcttgtagctgcacctttttcaccatccggtccgccaagctgactcatgatcgccattgcaagctttgcatctgttgttttaatattaaccggatattcc

SEQ ID NO: 31457 - DNA, 260 bp, Unknown
  Description of Unknown: RightRegion for integrase B5458 sequence
aatggtggagagttcgtattccaacccctcacctccaccaataaactaaactgcacttagtttaagtgcagtttttcttttatccaaaattatattatttattatatgctaaaaacctacctaaaataaataggtaggttttttacgaacatttttaattttaattacttaccggtaatactttttattttacggtaattttgcacttggcatattttttacttccgtcttttgcagtagcgataatatagcaagtaccc

SEQ ID NO: 31458 - DNA, 260 bp, Unknown
  Description of Unknown: RightRegion for integrase B5459 sequence
ttgtcggatttcgcttccaatgcaccagcatggagaggaagaaaaacagcgtcacaatgaccggcagaaagctcaaaacgctgccgacgccggtgaaaataccatcgatgacaagcgagtgcagcacagggttcacgttcgctgccgtcatgccgcggtcgacaatatccgtcagcgcgccgatgcccatgtccagtaaattcgataaaaacgcgccgatgacgttaaacgtcagccagaatacaagacccataatgccg

SEQ ID NO: 31459 - DNA, 260 bp, Unknown
  Description of Unknown: RightRegion for integrase B5460 sequence
atttacactgcacccggagctgtgatcctgtcatgcagcaggtcagcggctagcttttaaaacccagaccagagctctctcgtctcgtactctgtcagcggcagccccggaactcagcaaacttgtacctacctcttgtgtaaataattatgtttttactttagtacatgctgaaatacttcgccaccttgtgtgccggtgcatccggatcgcagatgaagtcatgcgccagatcgaagtagaagtcaggcgtgtccacc

SEQ ID NO: 31460 - DNA, 260 bp, Unknown
  Description of Unknown: RightRegion for integrase B5461 sequence
ggactacctaatggtagtccttattttttgcccaaaatagcaaaaaatcgcataatatagcggttttcttttatcaggtgtgcgaattttgctgtttacagcacatttcttgcaatcctgattgctcccctaacgtacttgggattgttttttgagcaaacattaaaccgcccaagcgcaatgcttgggcggttattttaccttaggcacacataactgtatggtatgcctctttcgtttaagcaaacatattcatctct

SEQ ID NO: 31461 - DNA, 260 bp, Unknown
  Description of Unknown: RightRegion for integrase B5462 sequence
tttgaagacggggaggagttcggatgccgtgcgtctcgctccaccataagtccaccgtaattttgatagaattacggtggactttttctatgcccgaaaaccgcttgaaataaggattttcggctatttcggcacacaagtgaaccccgctgcaggcaattctgcggcggggtttgtgcgttttaggaggattgtagctttctgtggcgttgtaatcgttaaacggctggggcaatcgttgaattactggagtattcgtt

SEQ ID NO: 31462 - DNA, 260 bp, Unknown
  Description of Unknown: RightRegion for integrase B5463 sequence
acagcagaaagaaacgaccattcaccaggtaaaataaagcttacgataatacttaaatagtatagtatgccatcatcgcactacttacaccttaccgttaattacttctttagttggatcgatgagcgcataacttccattaggtatttttctgttcatgctttccccgtttactttaagaagaaaagcgtttggatacctttcatgcatgatgctaggaataacaaaagtttcatcgttttctatcatttcgataggtg

SEQ ID NO: 31463 - DNA, 260 bp, Unknown
  Description of Unknown: RightRegion for integrase B5464 sequence
agcagtggttcggatttgaacgcaaatgctccacggatggtcaaggttgaaaaaccttgaccttttcttttgctttcaaacatcccgcagcaaaaagccgaccggacggaggatttttcccctgcccggtcggtttctgtttgcaattgccttatctcggcatcttccgaatatacagcgtcgccgtctgcgaatcaaaaacatacagtgtcacgccataaaatcccttccagaacccctgcgtcacctgcttgatttcc

SEQ ID NO: 31464 - DNA, 260 bp, Unknown
  Description of Unknown: RightRegion for integrase B5465 sequence
cgttttgaagacggggaggagttcggatgccgtgcgtctcgctccaccaacacaatataatccgaaccctttgccgattggccgtgggttcggatttattgttttgtccgccgtcccggcataattttccccgccgccgcataatagacaggggaggggaacgctatgaagcctgctgtttatctgtacggtgtgccgggtcaatacgaaaactatctggcggcactggagagcgccggggcccgggtggtcctgtgccg

SEQ ID NO: 31465 - DNA, 161 bp, Unknown
  Description of Unknown: RightRegion for integrase B5466 sequence
cagaaccatattgatgtgtattattacatgatgaaagccccggaaaaccttgtaaaataaggctctccggggctttacccttggctcataccctctttcggtttggtcaacctctgcgggattagatggaatcagattgataaacagaaaacagataaagg

SEQ ID NO: 31466 - DNA, 260 bp, Unknown
  Description of Unknown: RightRegion for integrase B5467 sequence
gatgctgcaagtggtgaagtgttcggatgctgtgcgcaaagtcccaccataagactgtgataaaaaagatgtcacagtcttttttctttgttgtagcgtcgaaaatcggcgatttcgccaaccgatttttgaacacggttttacagtgttgtccaaccatttttgggcggtttgcccaccctgaagcccactttttctgccgttttttggaatttggcaggggagggggcaatttttttgagaaaaaacagaataaatcc

SEQ ID NO: 31467 - DNA, 260 bp, Unknown
  Description of Unknown: RightRegion for integrase B5468 sequence
tgcgaagactttggaaggggacgcggtggtcaaatttatcttgatatttttttaaagtagacatctatgatgatggtggctataaaagactcttgatactgtttcaagagcctttttaaaaggaggatacctatgagattaacacttatagaaaaagaagatggctataaaatcttagaagagggaagagaaatctattccattcgtgaagaaaaagaaggagaacttctttctatctatttagtgaatctatatggcaa

SEQ ID NO: 31468 - DNA, 260 bp, Unknown
  Description of Unknown: RightRegion for integrase B5469 sequence
attctgattgaccggatcgatattgatgaggatgtcattgaaattacctggaacatctgatgaaacaaaagctaaatctgatggagaacaaaacaacagaaatttctaaaaacaattcttttatttttttgcttgtataagtactctttgcttcaccgaatctctggtaatgcacgatttcacgctgacgcaggaaacggatcggatcacagacttccggatcttttacgagcctgagaatgttatcgtaagtcgtacgg

SEQ ID NO: 31469 - DNA, 260 bp, Unknown
  Description of Unknown: RightRegion for integrase B5470 sequence
cagaaccatattgatgtgtattattacatgatgaaagccccggaaaaccttgtaaaataaggctctccggggctttgcccttggctcataccctctttcggtttggtcaacctctgcgggattagatggaatcagattgataaacagaaaacagataaaggaaatcgcaagcagcaatggaacagccatcatcagacggcgaatgacatatcgtttcacagcttttcccctctttcttatagattttcaggtcttatctt

SEQ ID NO: 31470 - DNA, 260 bp, Unknown
  Description of Unknown: RightRegion for integrase B5471 sequence
acctacgcctacggcatacgcaggggcttcgcgctcctggtcaccgatgtggcgctgtgactatcctatcacgagctgttggcctgggtagatgcgattggggtctgcgattccgttcgctgccgcgatttcctgataggtcgtgccgaacttcgcggcgatgcccgagagggtgtcgccgctctgcaccgtgtacgtgtgcttggtcgataccgtgccgccgatcgggattgacaggcgctgcccggtgtagatgaggt

SEQ ID NO: 31471 - DNA, 260 bp, Unknown
  Description of Unknown: RightRegion for integrase B5472 sequence
aggttatcggattacgcttccaatactccagtggagcaatggcaacaaatgaatgggtagacggtggcgtctattatgtggatgcgaatggaatctacattccagggaagacacagacaaccggaaattggcagaaagacaacactggctggtggtatcaaaatgcagatggttcctatccaacagacaaatgggaagaaatcaattctaaatggtatcactttaatgcaaacggttatatggagacgggatgggtcaca

SEQ ID NO: 31472 - DNA, 109 bp, Unknown
  Description of Unknown: RightRegion for integrase B5473 sequence
gaaaaccccgcagtcaaaatgctgcggggttcgagtgaagattgtttggtgacccggtagggattcgaaccctagacctactgattcgtagtcagtcactctatccagc

SEQ ID NO: 31473 - DNA, 72 bp, Unknown
  Description of Unknown: RightRegion for integrase B5474 sequence
gagagttcgtatctcaatcaaatggtgatccacccgggattcgaacccgggacaccctgattaaaagtcagg

SEQ ID NO: 31474 - DNA, 260 bp, Unknown
  Description of Unknown: RightRegion for integrase B5475 sequence
attctgattgaccggatcgatattgatgaggatatcattgagattacctggaacatctgatgaaacaaaagctaaatctgatggagaacaaaacaacagaaatttctaaaaacaattcttttatttttttgcttgtataagtactctttgcttcaccgaaacgttggtagtggacgatttcacgttgtcttaagaaacggatcggatcgcatacttcaggatcttttacgagacgaagaatattatcgtacgttgtacgc

SEQ ID NO: 31475 - DNA, 69 bp, Unknown
  Description of Unknown: RightRegion for integrase B5476 sequence
tcgcattttagcgttttggtgggcccacctgggatcgaaccagggaccgaccggttatgagccggttgc

SEQ ID NO: 31476 - DNA, 260 bp, Unknown
  Description of Unknown: RightRegion for integrase B5477 sequence
cgttttgaagacggggaggagttcggatgccgtgcgtctcgctccaccaatgcaagataatccgaaccttagaccaatcggtcatgggttcggatttattgtttttatcaaggacattgaagtttagtttcgggatagaataacatcaaattcaggaggatatacccatgaaaaagcccataagctgtgcgttcaatatggataccgcctgtgtggagcttcgcttcacggacgggagcatttgctccatcgactgcacc

SEQ ID NO: 31477 - DNA, 101 bp, Unknown
  Description of Unknown: RightRegion for integrase B5478 sequence
accaaaatgatgacgggaaattccgggtgttcgcgttgcgaacgtttggtgacccggtagggattcgaaccctagacctactgattcgtagtcagtcactc

SEQ ID NO: 31478 - DNA, 260 bp, Unknown; identical to SEQ ID NO: 31464
  Description of Unknown: RightRegion for integrase B5479 sequence

SEQ ID NO: 31479 - DNA, 153 bp, Unknown
  Description of Unknown: RightRegion for integrase B5480 sequence
aggttatcggattacgcttccaatactccacttttgaatctcccacataaaaggtcatagcctcaaagtcaaagtgaaaaagatcaatatgggtcggtgcatttttatggcttgacgcttgctttcgcagttgggtattcacccttgcccgca

SEQ ID NO: 31480 - DNA, 129 bp, Unknown
  Description of Unknown: RightRegion for integrase B5481 sequence
acgttgtcggatttcacttccaatgcaccagcattgcgcagaagtataactgtgcgctgacccggctggactttcagcaggaggaaggactgatgagcagtctcccgctggggctgaatcagatcgaga

SEQ ID NO: 31481 - DNA, 260 bp, Unknown
  Description of Unknown: RightRegion for integrase B5482 sequence
cagtgttcgtctaatgttcatatggtgcaccatcggggactcgaacccaggacccactgattaagagtcagtaccgggcaacgatacaacgttcaaattatcgttttaccgttagtctcaggtagtcaaaagtagtcagaatggctccgggatgtagtcagtttgtagtcaggcagttcccgccgtactatccgcggcgggcggggcagagttgaaataatcgtccagtttgccacttactttcaggccgtcttcggctt

SEQ ID NO: 31482 - DNA, 260 bp, Unknown
  Description of Unknown: RightRegion for integrase B5483 sequence
cttcccggttcggatatggggagtagtagtccaccacaaagacctgtcagagaaatctgacaggtcttttcttttggtttaaacatgcggaaaaatcaaaacccgtcgatcagccgctcggcaatgggggagatgaacagcacaaaaagcagtacgccaagccccgtgataaggctggctgcgtcgccgccgatgtaccaccccagcgggaaggtgagcagcagaagcccgggcacggcaaagcagttcagtaaaaacgc

SEQ ID NO: 31483 - DNA, 260 bp, Unknown
  Description of Unknown: RightRegion for integrase B5484 sequence
gtggagctcaaccccaatcatgttgagcctagggaaggcaacggcctcccgctgccataagaaaagcctggaacatcaatggttccaggcttttcttatgccattttgtggtttgacccttattcctcaaaaataaagaaaatgaaaaggaagtgactcccccagaaaggtaagccactttcttttatttatcttggtttacgcagttttgacatgtgtattttccattgggtaatgcttttaagttttctgtagattgg

SEQ ID NO: 31484 - DNA, 260 bp, Unknown
  Description of Unknown: RightRegion for integrase B5485 sequence
cgttttgaagacggggaggagttcggatgccgtgcgtctcgctccaccaaaacaatataatccgaaccttgtgccgattggtcatgggttcggatttattgtttctatcgaagaaatcgaagactggtaatagaaaaaccgggaggactaccgattgcggcaatcctcatggttgctttatgtaggcgctttgtccgacgcttgcttcgttgccttccactcggcaaatgcctccttgccttcttcgctctcgtaatatt

SEQ ID NO: 31485 - DNA, 101 bp, Unknown
  Description of Unknown: RightRegion for integrase B5486 sequence
gaaaaccccgcagtcaaaatgctgcggggttcgagtgaaaatcatttggtgacccggtagggattcgaaccctagacctactgattcgtagtcagtcactc

SEQ ID NO: 31486 - DNA, 128 bp, Unknown
  Description of Unknown: RightRegion for integrase B5487 sequence
acgttgtcggatttcacttccaatgcaccagcattgcgcagaagtataactgcgcgctgacccggctggacttccagcaggaggaaggactgatgagcagtctcccgctggggctgaatcagatcgag

SEQ ID NO: 31487 - DNA, 260 bp, Unknown
  Description of Unknown: RightRegion for integrase B5488 sequence
tgctgcaaggaatggggagccaaagcaattctaagcactaaccatcgagaaaaggtatagagagtgatatttgtgaatctcttcctttgaacgatggttagtgtcgttttatacagttttattgtatttatttgaaatatggaaggtcaagcctccgtatgcgtacattttgtatgcgtacggaggctttttttgttgctccgaaaaggagactaatactaattccaaatcagcctatagacaaaatccattttctgccg

SEQ ID NO: 31488 - DNA, 260 bp, Unknown
  Description of Unknown: RightRegion for integrase B5489 sequence
actaaagctctacaagagcatttacgtaaactaaaagaaggaacttctgatgaagactgaaaaagaatactatctgggtgagcattcatgtggtcttgcgtgtccttgtaactactacaagaacactttagagattgaatgggctaataagaatatgcctaagtggaaagctgagcttaataaaatgatatctctaaacgaaaaagagattgttcctcattattatcatttagataaagatggaaactgtttgttcggtg

SEQ ID NO: 31489 - DNA, 260 bp, Unknown
  Description of Unknown: RightRegion for integrase B5490 sequence
cagctcattgccgtcataaaagctacggaaaacacctgtgaaattacatggaaggtctgattttttatacttcatcttgattgcagtgcttcgccgaagcgctgaaaatgcacgacctcccgctcccgcaggaatttgatgacgtcgttcacatccgggtcgtcagaaagccgcagaatattgtcataggtcacccgcgccttctgttccgccgccatgtcttcaacaaggtcggccatggggtcgccttttaccgccat

SEQ ID NO: 31490 - DNA, 260 bp, Unknown; identical to SEQ ID NO: 31476
  Description of Unknown: RightRegion for integrase B5491 sequence

SEQ ID NO: 31491 - DNA, 260 bp, Unknown
  Description of Unknown: RightRegion for integrase B5492 sequence
gatgcatcgactggaggagcgttcggatgctgtgcgcagtgtcccaccataacaatataatccgaaccttttaccaattggtcatgggttcggatttattgttttaatggaagaaattgaagactggtaatgaaaaagccgggaggactgccgattattgcaatcctcccggcttctttatgtagatgcggagtccgaaatctccttctttgctttccattcgtcaaaggcccttttgccatcttcactttcgtagtact

SEQ ID NO: 31492 - DNA, 260 bp, Unknown
  Description of Unknown: RightRegion for integrase B5493 sequence
gaaaagattgaattcagccgcgataacgacgatgaattcatcttagacatctatttctaaagacaccgggcaatgatcagaacccatgatatctgtatggatatcagcggcttcaatcttatcctttgcaaagtcggatgtcagaaaataatccagacgccatccggcatttctttctctggctttgaaccgataggaccaccaggaatatttaacttcatccggatgcatatatctgaacgtatctgtaaagccggagt

SEQ ID NO: 31493 - DNA, 260 bp, Unknown
  Description of Unknown: RightRegion for integrase B5494 sequence
agaaaaccaggttcaaagaaatctaaggtagaaattacgatccatccaaagatagaataaaactgacataaacaaaccgataaccaattcaacgttttatcaggttcatttgccggtggtgaaggtgattatgttgcattatttgaacctgctgcttctgaaatagaaaagcaaggtaagggctatgtagtagcttctattggtgaagaatctggacttattccttacactgcttattctgcacctaaagattatataaa

SEQ ID NO: 31494 - DNA, 260 bp, Unknown
  Description of Unknown: RightRegion for integrase B5495 sequence
tttgccgacgatccacccgagggcgagagttcggattttaatgcttgtggttcaccataaaccgaaccgtagcccgagaagcaagaagggctgcggtttttcattttttaagtgcggtatcaagaggggaaagggagcaaaagttgactgtagttttagagggaatcaagtgcacatattttttgaccatttcaaggcttgtatgcccgagaattaattgcagactgtagatatcgccgccgttctccaaatagcgtgta

SEQ ID NO: 31495 - DNA, 260 bp, Unknown; identical to SEQ ID NO: 31476
  Description of Unknown: RightRegion for integrase B5496 sequence

SEQ ID NO: 31496 - DNA, 260 bp, Unknown
  Description of Unknown: RightRegion for integrase B5497 sequence
gaacctgacgggtataaaatcaccaccgcatataacctaacctcttgcaaaactgaatgaccctacccaattcgaacaagccgatgagacttgaggattgggtggggtcattttatgtcctgaaagtcttggtatgacagggatttcagtgagtggcgcgctgaagcaaatatgagacacaaaaacacaaaccgcttcaatttggcgtagaaaacaaaaaaatcaggcggttcgaacatggatgtctcatttgacattct

SEQ ID NO: 31497 - DNA, 109 bp, Unknown
  Description of Unknown: RightRegion for integrase B5498 sequence
gtcaaggaaataagaatagatggcataaataaaaaaacggagctagaaacttacttctaaccccattaaaattatctactattcttttcgtatggttgaccatctgctg

SEQ ID NO: 31498 - DNA, 260 bp, Unknown
  Description of Unknown: RightRegion for integrase B5499 sequence
tattttcgtcaaagccgaacttcccccttcgcttttgatgtcacatttatcaatatgtaatgcaaaaagagccgcaatcatgcggctctcttatttcttataaggtgtacaatgttattcgctgcaagaatcatagattctctccgcatcgatacagacagcctctttaaagcaggtgcagtcattaggtcggaatgctttcgattctgccataatatccctccgtttgattcctgcggcctgccagaggaaaagccgca

SEQ ID NO: 31499 - DNA, 260 bp, Unknown
  Description of Unknown: RightRegion for integrase B5500 sequence
gacactaaagcacttaaggagttaatagatggattcaacaaagaacggcgagaaagatgagttggatttgttaatggaacgcatgatggacccgtcttttcctgtgtacatcaaggaaaacaatattgtcgttttcccgattgaaccaaatgtatattgtttttcatcggttgaagatgctgaaaaacgaggataccacgtaaaagatatggagcattatgatacgttgagtatcacagaaaagaaaaactttaatcttt

SEQ ID NO: 31500 - DNA, 260 bp, Unknown; identical to SEQ ID NO: 31474
  Description of Unknown: RightRegion for integrase B5501 sequence

SEQ ID NO: 31501 - DNA, 260 bp, Unknown
  Description of Unknown: RightRegion for integrase B5502 sequence
attctgattgaccggatcgatattgatgaggatgtcattgagattacctggaacatctgatcaaacaaaagctaaatctgatggagaacaaaacaacagaaatttctaaaaacaattcttttatttttttgcttgtataagtactctttgcttcaccgaaccgctggtaatggacgatctcacgttctctcaggaacttgataggttcgcatacgtcatagtctgttactacccggaggatgttgtcataggtactccgg

SEQ ID NO: 31502 - DNA, 260 bp, Unknown
  Description of Unknown: RightRegion for integrase B5503 sequence
aaaaaagagataccagatgaaaggtatctctttttatttattagtatgtacaagacttgaacttgcggcaggcttctccgaattcgacgagctaaagcgaagtgcgaatttgggagaaacagtccgatggactgtttcgtagaaggctagttcagttccgtgtcacctcgaccatttgaccttagaaagcaaatgcttcctaagggattgttttttgagcaaacattaaaccgcccaagcacaatgcttgggcggttatt

SEQ ID NO: 31503 - DNA, 176 bp, Unknown
  Description of Unknown: RightRegion for integrase B5504 sequence
tattttcgtcaaagccgaacttcccccttcgcttttgatgtcacatttatcaatatgtaatgcaaaaagagccgcaatcatgcggctctcttatttcttataaggtgtacaacgttattcgctgcaagaatcatagattctctccgcatcgatacagacagcctctttaaagcagg

SEQ ID NO: 31504 - DNA, 260 bp, Unknown
  Description of Unknown: RightRegion for integrase B5505 sequence
gaggcagcggtggagggtgatccgggcggttcgtgttttgcgccgtccggcgcatcatgaaaatcagcagagaagatctgctgatttttgcgttataattatggtgatataaattttgtattttggcatgtcttttttcagtaagctatcgaataaattctcctgcaagtacaatcattctttcaatccatgaaatgaacaaagtataacataatgaacaaagtgtaacataatgatacaaatttacagtatttgggaaa

SEQ ID NO: 31505 - DNA, 260 bp, Unknown
  Description of Unknown: RightRegion for integrase B5506 sequence
gatatgtcagtgcacggttcggattgtctattatatggggagccagaaaaaagcccgtaaacactgcgtttgcgggcttttcttattttttctcagtgcctttgaaaaggcaaaatagctcacttgcctgcaaaattgagcgagtgagcgataaccggaaaatttcgattcaaagcacggaatatgattgcctatcctttgtttgagaaggtcaatttacgcggccccgcattttttaatgcggggccttttttgtttgg

SEQ ID NO: 31506 - DNA, 260 bp, Unknown
  Description of Unknown: RightRegion for integrase B5507 sequence
gatgctgcaagtggtgaagtgttcggatgctgtgcgcaaagtcccaccaaaaggctgtgacaataatgttgccacagccttttttcttcgttgtaacgccaaaaattgaccaactttgcgtcgatttttggcgcttatttttatggagatgtccacctgttttcaaggtgaaagaccagctttctgctcagaatttcccgattttcagaaaaagggcaggggagagaagcaaattttcagaaaaaatgggtgcattttct

SEQ ID NO: 31507 - DNA, 260 bp, Unknown
  Description of Unknown: RightRegion for integrase B5508 sequence
gatgctgcgcgcggtgaagtgttcggacactgtgcgcaaagtcccaccaaaagcctgtgacaaaaaagatgtcacaggcttttttctttgctgtatcgttgaaaattggcggtttcgacagctaattttcgagttgctttttataaagatgtccagcggttttcagactgttggacatttttattgcctcatcttcccgcaaaattctgaattgcggcaggggagagggcaattttttttgagaaaaacagaataaatcc

SEQ ID NO: 31508 - DNA, 260 bp, Unknown
  Description of Unknown: RightRegion for integrase B5509 sequence
gctccaccaaaagtcaaaatccgaacattatcatcaatggtgatacgttcggatttttgatttttatgagtttttataatttagaaattactgtggtttgtagcatattctcggcctcctccaagccttgcatcacttccgccatgatgcgagtggccaagataaatcctgaactgaacgcttcacactcagtgatgcaagacagttcacttgtgcagtccttgattttttcaaaggtttctttttgtttcattgtcaga

SEQ ID NO: 31509 - DNA, 260 bp, Unknown
  Description of Unknown: RightRegion for integrase B5510 sequence
cgttttgaagacggggaggagttcggatgccgtgcgtctcgctccaccaacacaatataatccgaaccccttgccgattggccgtgggttcggatttattgttttgtccgccgtcccggcataattttccccgccgccgcataatagacaggggaggggaacgctatgaagcctgctgtttatctgtacggtgtgccgggtcaatatgaaaactatctggcggcactggagagcgccggggtccgggtgatcctgtgccg

SEQ ID NO: 31510 - DNA, 101 bp, Unknown
  Description of Unknown: RightRegion for integrase B5511 sequence
gaaaaccccgcagtcaaaatgctgcggggttcgagtgaagattatttggtgacccggtagggattcgaaccctagacctactgattcgtagtcagtcactc

SEQ ID NO: 31511 - DNA, 260 bp, Unknown
  Description of Unknown: RightRegion for integrase B5512 sequence
accctgattgaatctattcatgttggacacggtaaagttaaaattgcatggaaaatctgatgtggtagtctgattgttttgctttctcggttttacctccgaatgattgtgatcctgtcttatgcgcacggttaaagaatcagtttgctgttctccatttaaatgatttgtatagtaagcatgccgcagaagagatgattgcagttttcaatcgtcatttgcgcatctataaagttgcaggcacaataggagtaaaagaa

SEQ ID NO: 31512 - DNA, 260 bp, Unknown
  Description of Unknown: RightRegion for integrase B5513 sequence
gatatagagggagtaagatatcactcaaaagtcaaattggatgtttattttaaattttaagcgaggtgtttcaaaatgcaggaaaatgaaacttatgtaatctatttgagaaagtctcgtgcagatagcgaaaaatctagtttagaagaagtatttgcaaaacacgaatcagaactccagtcactcgctgaacgcactttaggcaatcgtattcctgaagataaaatctttcgagaggttgtatctggcgaaacaatcac

SEQ ID NO: 31513 - DNA, 260 bp, Unknown
  Description of Unknown: RightRegion for integrase B5514 sequence
accctgattgaatctattcatgttggacacggtaaagttaaaattgcatggaaaatctgatgtggtagtctgattgttttgctttggcattgctaacaataaataatgttgatataataacaatataacacaggcacagtatttgaactctaaggcacagttgaacaagcggagcatggccgcataggccgggagataacagcatatggatgaaacggtatttctggcgcatattgcggaagacggaagagaacaaacgg

SEQ ID NO: 31514 - DNA, 260 bp, Unknown
  Description of Unknown: RightRegion for integrase B5515 sequence
accctgattgaatctattcatgttggacacggtaaaattaaaattgcatggaaaatttgatgtggtagtctgattgttttgcttttccgctctatctaagtcaatttcttcaacaagtcccggtttaatgggattcttaggcaacaaataaacataaccaagtgttgccataggaaagcggtcatgcaaggaaatgcattcaccaataatgccctcataatagttttccaagttctttcctacagaggacatttgacttc

SEQ ID NO: 31515 - DNA, 260 bp, Unknown; identical to SEQ ID NO: 31512
  Description of Unknown: RightRegion for integrase B5516 sequence

SEQ ID NO: 31516 - DNA, 260 bp, Unknown
  Description of Unknown: RightRegion for integrase B5517 sequence
cttttgaggtatctgctgttgcccagcagaacgatagcgcaccgccaatccaggccttaatggagccggatggcagtgggattatcgtttgtttttagggctaccgtttaatttgtaggctatcgttttattttgggatggtcccccttcatgcttgactttattcggctggcggcatataatgaaacgggtcgaaaagactatttttgaaaccgaggcgtggtttaatggagtacattaccattcaggatgccgcagag

SEQ ID NO: 31517 - DNA, 171 bp, Unknown
  Description of Unknown: RightRegion for integrase B5518 sequence
gatatagagggagtaagatatcactcaaaagtcaaattggatgtttattttaaattttaagcgaggtgtttcaaaatgcaggaaaatgaaacttatgtaatctatttgagaaagtctcgtgcagatagcgaaaaatctagtttagaagaagtatttgcaaaacacgaatca

SEQ ID NO: 31518 - DNA, 260 bp, Unknown
  Description of Unknown: RightRegion for integrase B5519 sequence
accctgattgaatctattcatgttggacacggcaaagttaaaattgcatggaaaatttgatgtggtagtctgattgttttgctttatcaaaccctttgtcaaaaccactcaatgtaatttgaggctttaactctccatcctccactttatagaaccggtgcaaatcgtgaagaattggttcaagcaaaaatttcccgacgccacatgcaggatcacaaattttcatccccggagtgatgtctatcatattgacaatagct

SEQ ID NO: 31519 - DNA, 157 bp, Unknown
  Description of Unknown: RightRegion for integrase B5520 sequence
accctgattgaatctattcatgttggacacggtaaagttaaaattgcatggaaaatttgatgtggtagtctgattgttttgctttctcaaatcgacgtctacaagttcgggagcggattgggcgcattcgatgttgttaattaattcctttacccac

SEQ ID NO: 31520 - DNA, 260 bp, Unknown
  Description of Unknown: RightRegion for integrase B5521 sequence
accctaattgaatctattcatgttggacacggtaaagttaaaattgcatggaaaatttgatgtggtagtctgattgttttgcttttcctttcacttgaatttcatctgttctgtcggtttctcctggatatcgatcaccctggtgtcaccgaacttttcaatgcacatggccaggtgttctttgaccgcctgggcctggatgaccggcgcattgacttcaattgttactatcaacatttcaaatctcctgaatgcggatt

SEQ ID NO: 31521 - DNA, 260 bp, Unknown
  Description of Unknown: RightRegion for integrase B5522 sequence
aaaattgtagattctataacttgggatggtgctgatgggatagatataaatttaaaataaaaacacgcttttttgcgtgttttttactgtctttttatatgtcttgcacaatctgtccattccaaaagacaacaaaagagttaacaataagttaaccctttattctatctttctgctttcatatatcctattatatagtatttaagttcttttggtaaatctattactatttcttcacccttatattctataactgcttt

SEQ ID NO: 31522 - DNA, 260 bp, Unknown
  Description of Unknown: RightRegion for integrase B5523 sequence
aaaattatagattgtatagtttgggatggagctgatgggttaaatataaatttaaaataaaaaaaacacgcttttttgcgtgttttttttgatgtctttttaaatgtactgcacaaccagaccatccacctccaataacaacaattttcatataaatctcctcccctcaaaaatgtctcttggatttgcttgtaccttacagaatctctttactctatggcctgaaaatcttgtagtacagctaccacacacaccttctc

SEQ ID NO: 31523 - DNA, 260 bp, Unknown
  Description of Unknown: RightRegion for integrase B5524 sequence
ttaatcagaaagattattttaaccaggaatgatgttgtaatagaatgggcttttatttaacccattttttatgatacaaatcgaatcacgaatataagctattacgtgggtaaatagataaattcgtgattccacagcaaaatccctccctacttttctggtagggagggaaaatttatatttttttgcgcctaactttaacatggcgcttgttcacagatctgtccatctttttgaggatttcccgcatgatgaaatag

SEQ ID NO: 31524 - DNA, 260 bp, Unknown
  Description of Unknown: RightRegion for integrase B5525 sequence
aaaaacattgatattatcctagatgcagacaaaattactaatatggttatgggccaatagcacattgaaagaatacctgttaaaaggctttattcttgacacggacctttaaaaaacaacttttacacctcaagcaaatcctccataccacaattcaaggccttagccaaccgccaaactgtctctgcactagccttattgatattcttatggcgctgttcatacatttggatggagcgagaattaacaccagaaactct

SEQ ID NO: 31525 - DNA, 260 bp, Unknown
  Description of Unknown: RightRegion for integrase B5526 sequence
accctaattgaatctattcatgttggacacggtaaagttaaaattgcatggaaaatttgatgtggtagtctgattgttttgctttagctatacaatcaacatacaacatcttttaagcctcgtgaaactactcaatccgaggcgcatacatagaaatgttcgtttataagaccgctgtttagattaaacaacgctgttataagtgaacattcaaaagctgaatttataatggacagttaaacaacctcaaagcgaacgca

SEQ ID NO: 31526 - DNA, 260 bp, Unknown
  Description of Unknown: RightRegion for integrase B5527 sequence
accctgattgaatctattcatgttggacacggtaaagttaaaattgcatggaaaatttgatgtggtagtctgattgttttgctttagctatacaatcaacatacaacatcttttaagcctcgtgaaactactcaatacgaggcgcatacatagaaatgttcgtttataagaccgctgtttagattaaacaacgctgttataagtgaacattcaaaagctgaatttataatggacagttaaacaatttcaaagcgaacgca

SEQ ID NO: 31527 - DNA, 260 bp, Unknown
  Description of Unknown: RightRegion for integrase B5528 sequence
accctgattgaatctattcatgttggacacggtaaagttaaaattgcatggaaaatctgatgtggtagtctgattgttttgctttgacaaaacatccagaaaaaaatccaatacatattttgactttatgtcatcgtgccccttgtggcctattccgggaataatatccatagatacgttaagtccgtttttctcatagttctttctgagattgataagcctttccattcggcttgttccccattttgactcacccacat

SEQ ID NO: 31528 - DNA, 260 bp, Unknown
  Description of Unknown: RightRegion for integrase B5529 sequence
accctgattgaatctattcatgttggacacggtaaagttaaaattgcatggaaaatttgatgtggtagtctgattgttttgcttttcgaaggtttcatccatattgtcacgaagttttaccaagatagcagctctcgggcagtcccagcctgtggcaacagcttgcttgatgataacagcaacagaaggagcattggtttcttcaatgccatccaagttttcgtgcatatcagagagccatactgcaagctggccattct

SEQ ID NO: 31529 - DNA, 260 bp, Unknown
  Description of Unknown: RightRegion for integrase B5530 sequence
acgaaaacagaatcgggaagccatatcgaaccgcagctagagtacactctgcgaatctgattcggcttccctctcttttaaagctataaggtagcattgagaatccgatttatcggatacccaatgatgccagagaacgaaagcccctcaaacgaggggcttttctcgatgtttcacgtgaaacctatgctgttcgccgccacatgtacacagccaggtatgggggaaggttgttgtgcggctggtttccacccgcgtac

SEQ ID NO: 31530 - DNA, 260 bp, Unknown
  Description of Unknown: RightRegion for integrase B5531 sequence
tgcgaacttacaattcttacaccgtcattgcttgctatctccaatattttcaaaaaatagtatagcacattttctttcgattgtcaacaaaaatccggcagtacaacccaggaaatctcctgctgtactgccggctttctgcttgttatttacttatactgccgtcaaatctcacggaaattatcaacgctcacgtaccctgtgacgtacttgcctgctggtttcttgccgcagtagtccttgcgtgtcgtgatccggaa

SEQ ID NO: 31531 - DNA, 260 bp, Unknown
  Description of Unknown: RightRegion for integrase B5532 sequence
gatatagagggagtaagatatcactcaaaagtcaaattggatgtttattttaaattttaagcgaggtgtttcaaaatgcaggaaaatgaaacttatgtaatctatttgagaaagtctcgtgcagatagcgaaaaatctagtttagaagaagtatttacaaaacacgaatcggaactccagtcactcgctgaacgtactttaggcaatcgtattcctgaagataaaatctttcgagaggttgtatctggcgaaacaatcac

SEQ ID NO: 31532 - DNA, 260 bp, Unknown
  Description of Unknown: RightRegion for integrase B5533 sequence
acgctaatagaatcaatcaaagtaggacagggaaatgttcaaattgcttggaaaatatgatatggtagtctgattgttttgctaaagctatacaatcaacatacaatatctttttatgctccggaagtctataaaaccggggtaatacataacaatttgtgtgcgcttataagagtgctttgcggataaaagcattgttataaaagcacaggcgtaaaaaaatagggtaggaacggagatttatccgcgcctacccttta

SEQ ID NO: 31533 - DNA, 260 bp, Unknown
  Description of Unknown: RightRegion for integrase B5534 sequence
accctgattgaatctattcatgttggacacggcaaagttaaaattgcatggaaaatttgatgtggtagtctgattgttttgctttacctgctcaatggagtgggatacaaatacgaccgttgcaccggaattgatcatcttcttcatgcggtcaaagcttttctcctgaaatttgtagtcacccactgccagaatctcatcaataattaaaatatccgggatgttcatcgtcgcaatagcgaagccgagccgggccacca

SEQ ID NO: 31534 - DNA, 260 bp, Unknown
  Description of Unknown: RightRegion for integrase B5535 sequence
cagcgttttgaagacggggaggagttcggatgccgtgcgtctcgctccaccagaacatagaaaaccagcaatccattgagattgctggtttttctttatttatcaatgctgtgtggcgctctcagagggatttcgctccctgcaaacattgaaaccgcaagctatttgtgttataaaaacttccaaaactcagagtcgggcgaaccgtgtaagtttgtccgactcttaccttttcacgataacagcaaaaaatcctgcag

SEQ ID NO: 31535 - DNA, 260 bp, Unknown; identical to SEQ ID NO: 31512
  Description of Unknown: RightRegion for integrase B5536 sequence

SEQ ID NO: 31536 - DNA, 260 bp, Unknown
  Description of Unknown: RightRegion for integrase B5537 sequence
ttaatcagaaagattattttaaccgggaatgatgttgtaatagaatgggcttttatttaacccattttttatgatacaaatcgaatcacgaatataagctattacgtgggttatctccgtcatgctaccgccgatggccatctttttcccactatttacccttttggaggactcgggttatcttccccggatcgcctttaatatggataaacatttcaaaaaggccggcgcgcatggaaagcagtccttaaccatgtgca

SEQ ID NO: 31537 - DNA, 260 bp, Unknown; identical to SEQ ID NO: 31525
  Description of Unknown: RightRegion for integrase B5538 sequence

SEQ ID NO: 31538 - DNA, 86 bp, Unknown
  Description of Unknown: RightRegion for integrase B5539 sequence
accctaattgaatctattcatgttggacacggtaaagttaaaattgcatggaaaatttgatgtggtagtctgattgttttgctttg

SEQ ID NO: 31539 - DNA, 260 bp, Unknown
  Description of Unknown: RightRegion for integrase B5540 sequence
accctgattgaatctattcatgttggacacggtaaagttaaaattgcatggaaaatttgatgtggtagtctgattgttttgctttagctatacaatcaacatacaacatcttttaagcctcgtgaaactactcaatccgaggcgcatacatagaaatgttcgtttataagaccgctgtttagattaaacaacgctgttataagtgaacattcaaaagctgaatttataatggacagttaaacaacctcaaagcgaacgca

SEQ ID NO: 31540 - DNA, 109 bp, Unknown
  Description of Unknown: RightRegion for integrase B5541 sequence
aaaattatagattgtatagtttgggatggagctgatgggttaaatataaatttaaaataaaaaaacacgcttttttgcgtgtttttttgatgtttttttaaatgtactg

SEQ ID NO: 31541 - DNA, 260 bp, Unknown
  Description of Unknown: RightRegion for integrase B5542 sequence
accctgattgaatctattcatgttggacacggcaaagttaaaattgcatggaaaatttgatgtggtagtctgattgttttgcttttccttttgcggaaacagccaataccattacggacatgagcataatgactgtcaacgccaacaccaaatgtcgtcttacaaatttcatagcaaacctccatatcgaatctgtgttgtcatcaaccattgccttttaccgctgatggcctgcggtaagcaatatgcgaatccccgac

SEQ ID NO: 31542 - DNA, 260 bp, Unknown
  Description of Unknown: RightRegion for integrase B5543 sequence
accctgattgaatctattcatgttggacacggcaaagttaaaattgcatggaaaatttgatgtggtagtctgattgttttgctttcgtggctgtttcaataataataggattatgctccattaaagttattccgatatgtttattagagtccagcatgctggcaatatgaaagttgccgtcatccggcagttcgtatcctgaatgagtttgtcccataagtccctgggcttgatcctcaattcgaattttgaaccgcacg

SEQ ID NO: 31543 - DNA, 260 bp, Unknown
  Description of Unknown: RightRegion for integrase B5544 sequence
cgtaagcacgaatcgggtagtgatatcgagcctgaactatgctttaaactcttaatttaatccgtctgcaagcatcgcgtatctgatttatcggacactcaatgcttacagacaataataatggcggatagtcgaatggctacccgccttttattatggtcagcttacccgcttccacatgaaaacagccaagtacggaggcatattattgtggggcttcccgccgcccgcgaacatggtctgcacgttcccgccgtaac

SEQ ID NO: 31544 - DNA, 260 bp, Unknown; identical to SEQ ID NO: 31543
  Description of Unknown: RightRegion for integrase B5545 sequence

SEQ ID NO: 31545 - DNA, 260 bp, Unknown
  Description of Unknown: RightRegion for integrase B5546 sequence
accctgattgaatctattcatgttggacacggtaaagttaaaattgcatggaaaatttgatgtggtagtctgattgttttgctaaagctatacaatcaacatacaacatcttttacgcctcgtgaaattactcaatccgaggcacatacatagaaatgttcgtttataagaccgctgcttaaattaaacaacgctgttataagtgaacattcaaagatggacattcataataggcaatgacctcatctcaaagcgaacgc

SEQ ID NO: 31546 - DNA, 260 bp, Unknown
  Description of Unknown: RightRegion for integrase B5547 sequence
gatatagagggagtaagatatcactcaaaagtcaaattggatgtttattttaaattttaagcgaggggtttcaaaatgcaggaaaatgaaacttatgtaatctatttgagaaagtctcgtgcagatagcgaaaaatctagtttagaagaagtatttgcaaaacacgaatcagaactccagtcactcgctgaacgcactttaggcaatcgtattcctgaagataaaatctttcgagaggttgtatctggcgaaacaatcac

SEQ ID NO: 31547 - DNA, 260 bp, Unknown
  Description of Unknown: RightRegion for integrase B5548 sequence
accctgattgaatctattcatgttggacacggtaaagttaaaattgcatggaaaatctgatgtggtagtctgattgttttgctttggcaaaatatagaaaagcaacgaacgaagcagcacaaaggaggaagaaccatgaaggtatcggatttcgttgaaggtaaattgatggaaattggcgccacaccggaatatactggttataagtatctggtatgcgccatagtaatgtcgatgcagaacgagtatcttttgaataa

SEQ ID NO: 31548 - DNA, 260 bp, Unknown
  Description of Unknown: RightRegion for integrase B5549 sequence
gataaccgaacaagaaatgatgattccccttttactatcaaaatcattcttaatctttaattccatcatcaatgtgctaattcttcagtacccagagaagcatcggaaatgttccaaatcaaagcgaactttgcggcgttataattagagttaaaacacttttaatagctgctgcaataggagcacatcaatcttctattgctttttcaataacggaaaccaattcacttacagtaccggcagaatgaataagatttaaa

SEQ ID NO: 31549 - DNA, 260 bp, Unknown
  Description of Unknown: RightRegion for integrase B5550 sequence
tgcgaacttacaattcttacaccatcattgcttgctatctccaatattttcaagaaatagtatatcacattttctttcgattgtcaacaaaaaccggcagtacagcaggagatttcctgttttgtaccgccggtttttctgtataattatgccttatttacactttccgaaaattatccacgctcacataccccgtaacgtactttcccaccggcgccttaccgcagtactccttacgcgttgtgatccggaaccgcccc

SEQ ID NO: 31550 - DNA, 260 bp, Unknown
  Description of Unknown: RightRegion for integrase B5551 sequence
ccgccgggttcgtatttggacacgttaggggcaccaaaaaatagccttacggaaacgtaaggctattttcataatgattgccgctttgtggagtgctttcatttgccgctgacttctgtctaagtcagcggctctttttattttttaagagaaattcaagaacttttagtgtaagagaaacggtggcatatatgcagctgccaataaaagtaagcagcaaaattatttcctgaaaactcaagcgttcacctccctcataa

SEQ ID NO: 31551 - DNA, 260 bp, Unknown
  Description of Unknown: RightRegion for integrase B5552 sequence
gatatagagggagtaagatatcactcaaaagtcaaattggatgtttattttaaattttaagcgaggtgtttcaaaatgcaggaaaatgaaacttatgtaatctatttgagaaagtctcgtgcagatagcgaaaaatccagtttagaagaagtatttgcaaaacacgaatcagaactccagtcactcgctgaacgcactttaggcaatcgtattcctgaagataaaatctttcgagaggttgtatctggcgaaacaatcac

SEQ ID NO: 31552 - DNA, 260 bp, Unknown
  Description of Unknown: RightRegion for integrase B5553 sequence
accctgattgaatctattcatgttggacacggcaaagttaaaattgcatggaaaatttgatgtggtagtctgattgttttgctttgccatgcagaagttccgtcctcaagggcatgaaataggtcttccagtattgaagattaaggaactccgccaaggttcatgtgatgatagcagtgaactctgctccttgagaatcaaacctgaatacatcattcacgatggcgatgtcatcttctcttggtctggaagtctacttg

SEQ ID NO: 31553 - DNA, 260 bp, Unknown
  Description of Unknown: RightRegion for integrase B5554 sequence
acgaaaacagaatcgggaagccaaatcgaaccgcagctagagtacactttacgaatctgattcggcttccctctcttttaaagctataaggtagcattgagaatccgatttatcggatacccaatgctaccagagaacgaaagcccatcgtttgaggggcttttctcgatgtttcgagtgaagcctatgctgttctcttccacatgtagacggtcaaatacgggggcatgttgtcgtacgccttgttcccgccagtgtac

SEQ ID NO: 31554 - DNA, 260 bp, Unknown
  Description of Unknown: RightRegion for integrase B5555 sequence
accctgattgaatctattcatgttggacacggcaaagttaaaattgcatggaaaatttgatgtggtagtctgattgttttgctaaagctatacaatcaacatacaacatcttttacgcctcgtgaaatcactcaatccggggcgcatacatagaaatgttcgtttataagaccgctgcttaaattaaacaacgctgttataagtgaacattcaaggatggacattcataataggcaataacctcatctcaaagtgaacgc

SEQ ID NO: 31555 - DNA, 260 bp, Unknown
  Description of Unknown: RightRegion for integrase B5556 sequence
aaaattatagattctataacttgggatggtacagatggtatagatataaatttaaaataaaaacacgcttttctgcgtgtttttttactgtttttttgtatgtattgcacatcctgcccatcctccaccaacaactactaccttcatattaatctcctcccctcaaaaatacctcttggactagcttgtactttacagaatctctttactctatgacctgaaaatctagctgtacaacttccacatacaccttcaccaca

SEQ ID NO: 31556 - DNA, 260 bp, Unknown
  Description of Unknown: RightRegion for integrase B5557 sequence
aaagcggagggtttgtttttggatggggttgcttcaccaactaaatatgcgtatttttaaattaaaaaatcgcatgaaaaaaagccgtagatacgttaaacagcgtatttacggcttttctgttttctcagaaatatgcacttttgttcagcgaggggtagaaactgatgatatccgacgcattttgtgtctcagaaaactgaaatcgtctattcacaaaaaagtgcgacagtgcgacagaaacgctttcctgactttcc

SEQ ID NO: 31557 - DNA, 260 bp, Unknown
  Description of Unknown: RightRegion for integrase B5558 sequence
accctgattgaatctattcatgttggacacggtaaagttaaaattgcatggaaaatttgatgtggtagtctgattgttttgctttctcaaatgacaatacaatgaacaacagcattttgactactaccaagaaatgtttgatgtttatcaagaaatacttgattgatatccatagatattgtataatgttgttcatggaggtgattcctaatgagtataagttacaataagctctggaaactgcttattgattgcaatat

SEQ ID NO: 31558 - DNA, 260 bp, Unknown
  Description of Unknown: RightRegion for integrase B5559 sequence
tttaaagaaaaaaacaaaaggaacgctaagtttgaattagatataaaattaaaaatataaatgtcatcatcatacggattattgaacatctgtatgatgatgacattaaggaataatatagtataaatggataatattaaattaaatgttaaatatgtgttaaatatgaaaggacatgcaatttttaaccagtgatttgcatacactatatcaagtgtatttgataagtgaaacgttctaaacttgtttagatatttaat

SEQ ID NO: 31559 - DNA, 260 bp, Unknown
  Description of Unknown: RightRegion for integrase B5560 sequence
acgaaaacagaatcgggaagccatatcgaaccgcagctagagtacactctgcgaatctgattcggcttccctctcttttaaagctataaggtagcatggagaatccgatttatctgatacccaatgatgccagagaacgaaagcccctcgtttgaggggcttttctcgatgtttcacgtgagatctatgctgttcgccgccacatgtacacagccaggtatgggggaaggttgttgtgcggctggtttccgcccgcgtac

SEQ ID NO: 31560 - DNA, 260 bp, Unknown
  Description of Unknown: RightRegion for integrase B5561 sequence
aagattataggctctataacttgggatggtgctgatggaatagatataaatttaaaataaaaaggagaacgttaagtctcctttttctatcgtattaattctaataaatcgtaatagtaatactttttatttcttgctttattatctgaaaatataacttttttatcttctaattgatttaaatatcttcttattgttgttatattaattccagtcatttcactcattagtttagcattaaatattggtctttcaaacat

SEQ ID NO: 31561 - DNA, 260 bp, Unknown; identical to SEQ ID NO: 31560
  Description of Unknown: RightRegion for integrase B5562 sequence

SEQ ID NO: 31562 - DNA, 260 bp, Unknown
  Description of Unknown: RightRegion for integrase B5563 sequence
accctgattgaatctattcatgttggacacggtaaagttaaaattgcatggaaaatctgatgtggtagtctgattgttttgccttaacaatcccgttaatatgaacgactcttccggaagttggcccaaatggttggaaaaagtcgcaaaagtagttgctgtggctgctatagttgtaaccgccgcgattgtagtcgcggttgctacagcgggcacggggggactagggtcggctgctgccggagttgcatttggaacag

SEQ ID NO: 31563 - DNA, 135 bp, Unknown
  Description of Unknown: RightRegion for integrase B5564 sequence
gaggccctgggcgaagggttcgacaagcgctcttccggctccaccataagtccaccgtaattttgatagaattacggtggactttttgtataaagaaaaccaccggcaatgccggtggttccaaaaagctttagc

SEQ ID NO: 31564 - DNA, 260 bp, Unknown
  Description of Unknown: RightRegion for integrase B5565 sequence
accctgattgcatctattcatgttggacacggcaaagttaaaattgcatggaaaatttgatgtggtagtctgattgttttgctttagctatacaatcaacatacaacatcttttaagcctcgtgaaactactcaatccgaggcgcatacatagaaatgttcgtttataagaccgctgtttagattaaacaacgctgttataagtgaacattcaaaagctgaatttataatggacagttaaacaacctaaaagcgaacgca

SEQ ID NO: 31565 - DNA, 137 bp, Unknown
  Description of Unknown: RightRegion for integrase B5566 sequence
accctgattgaatctattcatgttggacacggtaaagttaaaattgcatggaaaatttgatgtggtagtctgattgttttgctttacctaccaaaagagtgaaagaaggggtgtcatgtcgcgcattattgagttta

SEQ ID NO: 31566 - DNA, 116 bp, Unknown
  Description of Unknown: RightRegion for integrase B5567 sequence
accctgattgaatctattcatgttggacacggcaaagttaaaattgcatggaaaatttgatgtggtagtctgattgttttgctttgtccagagtaccaacaagataaccggttatg

SEQ ID NO: 31567 - DNA, 109 bp, Unknown
  Description of Unknown: RightRegion for integrase B5568 sequence
gcggcggctggtgaactgtccaaaaagttcgcacaaggtcacgtcgcctccaccaaatgaaaaaatccctctgagcatttgctcagggggattttttcatctggcggcc

SEQ ID NO: 31568 - DNA, 109 bp, Unknown
  Description of Unknown: RightRegion for integrase B5569 sequence
tccaccaatagttacaagcaggtagagaagtgtctctacctgcttttttattacatatagataccgcggagaatcgaactctgcgcagggcgcgggcgtaaagaaaacg

SEQ ID NO: 31569 - DNA, 260 bp, Unknown
  Description of Unknown: RightRegion for integrase B5570 sequence
gccatcgctccagttttttatggaatccgcgtgtcggattccattttttgttgccgttgatttgctgcagggctgcgcctataatatagaaagaacaatcaccgaggaggacattatggatatcaaacaactggagcaatatctgatgcagagcgatcttggcatcgacgcaaaacagctcgagcgttttctctcagaatgcgacctcgacgacaagggttttccgccggaggagcttgtcagctacatccgccgccaga

SEQ ID NO: 31570 - DNA, 260 bp, Unknown
  Description of Unknown: RightRegion for integrase B5571 sequence
agaaagcatgaaagcggcagcgacatcgagcctgaactggatttcaggctcttgatttaatccgtctgcaagcatcgagtatctgatttatcggaaacccaatgcgtacagaaacacaagatgcagtagcgtcttggctgccatatgcaacatatagggggaaaccgcttggtttcccccttttttcgctcgaaatgcccctacacccactagggcctgccatttctaacgccttagaacgcttctcagcaagccgttta

SEQ ID NO: 31571 - DNA, 260 bp, Unknown
  Description of Unknown: RightRegion for integrase B5572 sequence
gagttgccgagcaccacgtgcttgttgccggagcgctcgatccacatgtggatctggtaggggtcgccgtccttcatggccttgaacaccgaggggatgtgcgccatgtcccagcacaagatgcccttgtgctcgatggtgccgcagcgcttcatgaccttctccttggagagcaggcggggcgtgttgcccagctggtccttgcagggggccggcgcgaacttctgcagcatggtgccgggcttctccacattgcccat

SEQ ID NO: 31572 - DNA, 260 bp, Unknown
  Description of Unknown: RightRegion for integrase B5573 sequence
accctgattgaatctattcatgttggacacggcaaagttaaaattgcatggaaaatttgatgtggtagtctgattgttttgctttaccattagtaacatcggttatagccgccccctgaatttctccagatgtccgatcaattcctgaatatctgctttcagcgcagcagaatccggcgcggtgaatgtggccgcgccaaggacaatgtagtcgatggatacgccgaacaggtttgagagcgcgatcagcacatcgaccg

SEQ ID NO: 31573 - DNA, 260 bp, Unknown
  Description of Unknown: RightRegion for integrase B5574 sequence
gataaccgaacaagaaatgatgattccccttttactatcaaaatcattcttaatctttaattccatcatcaatgtgctaattcttcagtacctacattgtgctcagaaatgttccaaattaagccttatgcggacaagcccagtgctttcggattatttgtacatagctttgtaagctatgaaaggattggcaagtgggatgaggacagatacaggaaaggtggcagaaagccttattttatcgaactttgcggcactcc

SEQ ID NO: 31574 - DNA, 260 bp, Unknown
  Description of Unknown: RightRegion for integrase B5575 sequence
tttaaagaaaaagacaaaaggaacgctaagtttgaattagatataaaattaaaaatataaatgtcatcatcatacagatgttcaataatccgtatgatgatgacattaaggaataatatagtataaatggataatattaaattaaatgttaaatatgtgttaaatattctataaaaggaatattctacatattaaaaatcatatatttcattaagacttttgaaaattaagaaagttgagatgaaataatttaggcatat

SEQ ID NO: 31575 - DNA, 260 bp, Unknown
  Description of Unknown: RightRegion for integrase B5576 sequence
gctccctctgcgctggggagccaagcaattctaagcactaaccatcgagaaaaggtatagagagtgatatttgtgaatctcttcctttgaacgatggttagtgtcgttttatacagttttattgtatttatttgaagtatggaaggttaagcctccgtatgcgtacattttgtatgcgtacggaggcttttttgttgctcccaaaaaggagactaaaaatggctacagattatattaaccgtcctaatatggaaaattat

SEQ ID NO: 31576 - DNA, 260 bp, Unknown
  Description of Unknown: RightRegion for integrase B5577 sequence
accctaattgaatctattcatgttggacacggtaaagttaaaattgcatggaaaatttgatgtggtagtctgattgttttgctttctcaaataataaaaaaatttatttgtactatcgtgatggctacgatggcggaaaaaatgcactaggaggattcttaaattcggaaattggagtcatttcgatgggaataggcataggtgtagatgaagtagatattattgctcatgaatttacccattttgtttccagaagtatt

SEQ ID NO: 31577 - DNA, 109 bp, Unknown
  Description of Unknown: RightRegion for integrase B5578 sequence
aaaattatagattgtatagtttgggatggagctgatgggttaaatataaatttaaaataaaaaaacacgcttttttgcgtgtttttttgatgtctttttaaatgtactg

SEQ ID NO: 31578 - DNA, 260 bp, Unknown
  Description of Unknown: RightRegion for integrase B5579 sequence
ccaaaaaaagagataccaaatgaaaggtatctctttttatttagtatgcacaagacttgaacttgcggcaggcttctccgaattcgacgagctaaagcgaagtgcgaatttgggagaaacagtccggtggactgtttcgtagaaggctagttcagttctgtgtcacctcgaccaaaaggactacctaatggtagtccttattttttacccaaaatagcaaacagccgcataaaatagcggttttcttttatcaggtgttc

SEQ ID NO: 31579 - DNA, 260 bp, Unknown
  Description of Unknown: RightRegion for integrase B5580 sequence
accctaattgaatctattcatgttggacacggtaaagttaaaattgcatggaaaatttgatgtggtagtctgattgttttgctttaatgagttaaagacacttttttactcaattcgagaagagcgcgaagagtatcgtcagaggttaggtgagtacttttatatcgcgagcaatctttcctttatatatatcgataatatcgatcaaatgcttaaacgctgtgatatgatgagagaaaagagcgttttactgattggaa

SEQ ID NO: 31580 - DNA, 260 bp, Unknown; identical to SEQ ID NO: 31512
  Description of Unknown: RightRegion for integrase B5581 sequence

SEQ ID NO: 31581 - DNA, 260 bp, Unknown
  Description of Unknown: RightRegion for integrase B5582 sequence
attaatcaattgattactagtatagaaatatccgataatgataaaactcttatattttagggccttttaggctcttttttactgttattttagatgtatagcacaccctgaccaacctcccccaacaactactaccttcatattaatctcctcccctcaaaaatacctcttggactagcttgtactttacaaaatctctttactctatgacctgaaaatctagctgtacaacttccacatacaccttctccacagcacat

SEQ ID NO: 31582 - DNA, 260 bp, Unknown
  Description of Unknown: RightRegion for integrase B5583 sequence
accctgattgaatctattcatgttggacacggtaaagttaaaattgcatggaaaatctgatgtggtagtctgattgttttgctttagctatacaatcaacatacaacatcttttaagcctcgtgaaactactcaatacgaggcgcatacatagaaatgttcgtttataagaccgctgtttagattaaacaacgctgttataagtgaacattcaaaagctgaatttataatggacagttaaacaatttcaaagcgaacgca

SEQ ID NO: 31583 - DNA, 260 bp, Unknown
  Description of Unknown: RightRegion for integrase B5584 sequence
ttggattgctttactgcaccaagcaaaatcccacgattgaccgttgaaaatgcggtataaatcgtgggatttcttgttttacaacgaccccgaaacggctggaatgtgccttgtttgtgccttgctgccccaaaaactgccttgccgtgtccttacagagtgccttatgctggatgcccggcgggttattcttcagcggcttgctgctcgtagtcgtccagccacgccctcacggtttcaaggttcatcggaggcgggac

SEQ ID NO: 31584 - DNA, 260 bp, Unknown
  Description of Unknown: RightRegion for integrase B5585 sequence
gctccctctgcgctggggagccaagcaattctaagcactaaccatcgagaaaaggtatagagagtgatatttgtgaatctcttcctttgaacgatggttagtgtcgttttatacagttttattgtatttatttgaaatatggaaggtcaagcctccgtatgcgtacattttgtatgcgtacggaggctttttttgttgctccgaaaaggagactaaaaatggaaaattatataatagatgatattcttaaaatacttagt

SEQ ID NO: 31585 - DNA, 260 bp, Unknown
  Description of Unknown: RightRegion for integrase B5586 sequence
accctgattgcatctattcatgttggacacggcaaagttaaaattgcatggaaaatttgatgtggtagtctgattgttttgctttatccagatgatgaccaagctcgtgtgcgacggtgggaaggtcgtttgctatcctcgtttttatgctgtgggcgtgggtgttgtactgcccgagcacatcacgccgagacatacgcccagttccgacaggtatgccgaagtcgtggcgcatcttcccgatgatgtcagatatacgc

SEQ ID NO: 31586 - DNA, 260 bp, Unknown
  Description of Unknown: RightRegion for integrase B5587 sequence
accctgattgaatctattcatgttggacacggtaaagttaaaattgcatggaaaatttgatgtggtagtctgattgttttgctttaacgttgcttaattcttgatccgtttctgaatatcctcaatagacggtagctgcttgctcaaattctccggcaggctgcttgtaatcttgtattcgctgacgccgatgggcttggacatatccttcaaagcgtattcggcaacgaggtcgttcttgctcttacaaagcagcagtc

SEQ ID NO: 31587 - DNA, 260 bp, Unknown
  Description of Unknown: RightRegion for integrase B5588 sequence
accctgattgaatctattcatgttggacacggtaaagttaaaattgcatggaaaatttgatgtggtagtctgattgttttgctttagctatacaatcaacatacaacatcttttaagcctcgtgaaactactcaatccgaggcacatacatagaaatgttcgtttataagaccgctgtttagattaaccaacgctgttataagtgaacattcaaaagctgaatttataatggacagtttaacaacctaaaagcaaacgca

SEQ ID NO: 31588 - DNA, 260 bp, Unknown
  Description of Unknown: RightRegion for integrase B5589 sequence
actctgattgaatctgttcatgttggacacggtaaagttaaaattgcatggaaaatttgatgtggtagtctgattgttttgctttaccaaatcctcctccggtacatggggtgctactacaaccataagcgtatctcgactcaagagcacgggagcgacaaaaatcaaggtaacccctgttaacgctaatcagcaggttagcggaggcaccctctatttcagatcaaccggtacaaagtactcaagcatgaccaacacaa

SEQ ID NO: 31589 - DNA, 109 bp, Unknown
  Description of Unknown: RightRegion for integrase B5590 sequence
ttaatcagaaagattattttaaccgggaatgatgttgtaatagaatgggcttttatttaacccattttttatgatacaaatcgaatcacgaatataagctattacgtgg

SEQ ID NO: 31590 - DNA, 260 bp, Unknown
  Description of Unknown: RightRegion for integrase B5591 sequence
tgttcactggacattcatttcagaatttccgctgaacagttccttggaaaagcagcctaacgcaaatgtcgacagctcccattggaaagaatgatataatcaatcaagccaatcatccgagtgaggtggttggctattttaatgggaggattgaatatgaaacgagtctattgtctttaccgcgtttctacagttggacaggtggatcatgacgatatccctttgcagcgaatttcgtgccggcaatatgcgcagcagaa

SEQ ID NO: 31591 - DNA, 85 bp, Unknown
  Description of Unknown: RightRegion for integrase B5592 sequence
accctgattgcatctattcatgttggacacggcaaagttaaaattgcatggaaaatttgatgtggtagtctgattgttttgcttt

SEQ ID NO: 31592 - DNA, 260 bp, Unknown
  Description of Unknown: RightRegion for integrase B5593 sequence
tgcgaacttacaattcttacaccgtcattgcttgctatctccaatattttcaaaaaatagtatagcacattttctttcgattgtcaacaaaaaaccggcagtacaacccaggaaatctcctgctgtactgccggttttctcatttcagcttcttgtcaatgctcgcaacatgctgcaaaatctgttccaacgtgccgctttccgtggaaatgccgctgctgtcggcatcacctgccgcagctgcacctaacttgccgtag

SEQ ID NO: 31593 - DNA, 260 bp, Unknown
  Description of Unknown: RightRegion for integrase B5594 sequence
tttaaagaaaaaaacaaaaggaatgctaagtttgaattagatataaaattaaaaatataaatgtcatcatcatacggattattgaacatctgtatgatgatgacattaaggaataatatagtataaatggataatattaaattaaatgttaaatatgtgttaaatatgaaaggacatgcaatttttaaccagtgatttgcatacactatatcaagtgtatttgataagtgaaacgttctaaacttgtttagatatttaat

SEQ ID NO: 31594 - DNA, 260 bp, Unknown
  Description of Unknown: RightRegion for integrase B5595 sequence
accctgattgaatctattcatgttggacacggtaaagttaaaattgcatggaaaatttgatgtggtagtctgattgttttgctaattgacctcattatatgtcctattatgtattattgtcaataggtattttggtgctcatagaaataaaaaccccgctcctgttttagcgaggtttttaataagctatatttacatatattactatatgttatttattgtgcttgcggaacagataccatgacggcattctatatttt

SEQ ID NO: 31595 - DNA, 260 bp, Unknown
  Description of Unknown: RightRegion for integrase B5596 sequence
accctgattgaatctattcatgttggacacggtaaagttaaaattgcatggaaaatctgatgtggtagtctgattgttttgctttaccaatgcaatatctaattttgtggatttcaaaatattactcataatcgtcacctttcttgcttgtaaacactacaatttcatcaatggtggcaggctcaatagtcaggttggagaaaccgttaatatcttcggttttcatcagtgcctcaaatcccgtagggaatgtacgaata

SEQ ID NO: 31596 - DNA, 260 bp, Unknown
  Description of Unknown: RightRegion for integrase B5597 sequence
tttaaagaaaaaaacaaaaggaatgctaagtttgaattagatataaaattaaaaatataaatgttatcatcatacagatgttcaataatccgtatgatgatgacattaaggaataatatagtataaatggataatattaaattaaatgttaaatatgtgttaaatatgaaaggacatgcaatttttaaccagtgtttcgcatacactatatcaagtgtatttgataagtgaaacgttctaaacttgtttagatatttaat

SEQ ID NO: 31597 - DNA, 260 bp, Unknown
  Description of Unknown: RightRegion for integrase B5598 sequence
gacggtaggttatcggattacgcttccaatactccacaatggaagaaccgccgcccataaacaccattttggtcagatccagattataatggtttgcctgtatgataccataaatttcctctgcgtaggacttcaaacagttttttatgacgtcctgatactgcttcgggcagtcatagcttcctgtcctcataaatgcttctgtaatatatgccggtacccctgcccctgttttggcaatggcttcctcattgactttt

SEQ ID NO: 31598 - DNA, 260 bp, Unknown
  Description of Unknown: RightRegion for integrase B5599 sequence
agctccaccataagtaacaggcaggtagatactcatatctacctgcctttttatttctagtccgtaccgcggagaatcgaactctgtgcagggcgcgggcgtaaagaaaacgcgtaagcgtttttagcccgcgggcgaggacgccggcaggcggccgaagccggtgcggatttgcgaagcaaatacgcggattctccgcgcaatgcctcgactagatatagacgcgatgccgatcgcgctgcagcctgccgtgccccgca

SEQ ID NO: 31599 - DNA, 260 bp, Unknown
  Description of Unknown: RightRegion for integrase B5600 sequence
atatttaaaaagattgtttatgatcctaaaacagatacctttgaatattactttaaataacggactttggttcgttatttttttgtttaaattaaaagtattgcacaaccactattattaatttatatactaaattattctgtttaatttttaaatattaactagaaacgagaggattcctttttgtaaattagtatatttccttattaagttccattctcttactataataaccaattaatattgatttaacaatattg

SEQ ID NO: 31600 - DNA, 260 bp, Unknown
  Description of Unknown: RightRegion for integrase B5601 sequence
ttgatgattaccaccatagccgctacaagcgacagcttgaacatcacatggaaaatctgacgggcggaacccctcccgtcagaccgttaccctgtgtagtcccttgtaaactgtactttcggtaagactactgcaaacatgtcggagatggagaaggttgccctgcggtatcagttcgtgcagaatcagctggcaacggcagcaggagacttttccagaacttcggacggttgggcaaaccaggtgcgcattctgcagct

SEQ ID NO: 31601 - DNA, 109 bp, Unknown
  Description of Unknown: RightRegion for integrase B5602 sequence
atatttaaagaaataacttatgatcctaaagaggatacatttgaattctcatttaaatagcggacttttgttcgttatttttttggtttaaattgaaagtgtaggacat

SEQ ID NO: 31602 - DNA, 260 bp, Unknown
  Description of Unknown: RightRegion for integrase B5603 sequence
ttaatgctcactaccatagccgccacaagcgatagcttgaatatcacatggaaaatctgacgggcggcacacctcccgtcagatacctaccctgtgtagtcccttgtaaactgtactttccataaattcaaaactcagcagaatagcggctctgtcaacgtcccgcggcatgctctgcagcagctgcggcagcagcctgcgcgcccccacgtgcaggacctgcatcataagcttcaggcacgccgatacatcgttgttaa

SEQ ID NO: 31603 - DNA, 260 bp, Unknown
  Description of Unknown: RightRegion for integrase B5604 sequence
gaggaggccctgggcgaagggttcgacaagcgctcttccggctccaccaaaacaatataatccgaaccttttgccgattggtcatgggttcggatttattgtttctgttgaggaaattgaagactggtagctttgtctcgattcttgacacaatgcttgctgaacagccgtctgctcaaggtgttcttagggtgtatctgaaaactcccaacgcacccggacagcgggcctttttgcggtgcgccgcgtcatttttcctt

SEQ ID NO: 31604 - DNA, 260 bp, Unknown
  Description of Unknown: RightRegion for integrase B5605 sequence
gacggaatcacctatgataaggagaaaaaccggctgtattttaactttttcatttcatgaaaaaacgccgggaagccccattttataagggtttccggcgatttgtagggtattgcaatcggggccaccgtattgtgttgcaataatcttcgcgatccgtgcatccgttttcgtgatatttaccggatattgcaatcgtttttcatatatccacatacactaacacctgcctttcccggatctttcccatggccatggct

SEQ ID NO: 31605 - DNA, 100 bp, Unknown
  Description of Unknown: RightRegion for integrase B5606 sequence
aaccccgtcaacaaaatgttgacagggtgttcgagtagcattgctatggtgacccggtagggattcgaaccctagacctactgattcgtagtcagtcact

SEQ ID NO: 31606 - DNA, 260 bp, Unknown
  Description of Unknown: RightRegion for integrase B5607 sequence
gctttaattgaatccgtgcgtgtcaatcaggatactgttgacatcgtgtggaagatataaaaagcgttgtatgctgattgttttgttaagccttttttaataaagctttcaatatcgtttgtgcacggtatcggattattgattattccgctctcatagaagctgtaatcggagagagcgtcgataatcgggaaatcctcgagcaggggagcaacggcgctttttgccattgagtagctttcgatttggtcttcgttcgg

SEQ ID NO: 31607 - DNA, 88 bp, Unknown
  Description of Unknown: RightRegion for integrase B5608 sequence
gacaaaatacaagtggcgttgttggtgacccaggagagattcgaactcccgacaccttgattcgtagtcaagtgctctatccagctga

SEQ ID NO: 31608 - DNA, 109 bp, Unknown
  Description of Unknown: RightRegion for integrase B5609 sequence
agctccaccataagtaacaggcaggtagatattcgtatctacctgtctttttatttctagtccgtaccgcggagaatcgaactctatgcagggcgcgggcgttaagcaa

SEQ ID NO: 31609 - DNA, 260 bp, Unknown
  Description of Unknown: RightRegion for integrase B5610 sequence
ggaaaaagaaacggtaaaggagtgtataattttaagttgaatatttatttaaagatatagcgtttttttctatatctttttatttctatcatttacgagctaacgaacttgctcatgttgaaattattagtacccttttctatcaacttaccaatggtctaacacctcaagaaattaaagaaggtggattagatgcctattttactgatcatacattaggtgtctatccaacaaatagtgcgggtattccttttagtgcc

SEQ ID NO: 31610 - DNA, 260 bp, Unknown
  Description of Unknown: RightRegion for integrase B5611 sequence
agctccaccataggtaacaggcaggtagagaagtgtctctacctgcctttttatttctagtccgcaccgcggagaatcgaactctgtgcagggcgcgggcgtaaagaaaacgcgtaagcgtttttagcccgcgggcgagggcggcggcagccgaccgaagccggtgcggatttgcgaagcaaatacgcggattctccgcgcaaacttccgactcaaaacggatgcgatgtttatcgaatttcagccggccatgcgccgcg

SEQ ID NO: 31611 - DNA, 260 bp, Unknown
  Description of Unknown: RightRegion for integrase B5612 sequence
aatggttgcggggacacgcaactcataatatgtacattgaaattttttataaaaaaataaattttttcaaaaaaactattgacataccacccaatgggtggtataataaagacaagaaatgagggaaacctcaaaataataaccaaaagcaataaattttaggaggaaaagaaaatgaagagatttaaggtaacaaacgaaatgtacaaaaacggtaatgtagtagatgcaagtcgtgataattacgcaggcgattatgt

SEQ ID NO: 31612 - DNA, 260 bp, Unknown
  Description of Unknown: RightRegion for integrase B5613 sequence
aactttcaaaaactttttatgggaaaaagaacaaccgtgttccgtattttgagacgctaacagcaattttgaaaacaattctacttgaaatagaaaaatcatcgcctttaactaagcatatgccgaacaaatgtggtgtcgttaagaatgcgtctcgtagatctatattggcccgtagctcagatggtagagcgtctgactgttaatcagatggtcgcaggttcgagtcctgccgggtcagccatattgcggggtgtagc

SEQ ID NO: 31613 - DNA, 260 bp, Unknown
  Description of Unknown: RightRegion for integrase B5614 sequence
gatatagagggagtaagatatcactcaaaagtcaaattggatgtttattttaaattttaagcgaggtgtttcaaaatgcaggaaaatgaaacttatgtaatctatttgagaaagtctcgtgcagatagcgaaaaatctagtttagaagaagtatttgcaaaacacgaatcagaactccagtcactcgctgaacgtactttaggccatcgtatttctgaagataaaatctttcgagaggttgtatctggcgaaacaatcac

SEQ ID NO: 31614 - DNA, 75 bp, Unknown
  Description of Unknown: RightRegion for integrase B5615 sequence
gacaaaataaaagtggttttgttggtgacccaagagagattcgaactcccgacaccttgattcgtagtcaagtgc

SEQ ID NO: 31615 - DNA, 98 bp, Unknown
  Description of Unknown: RightRegion for integrase B5616 sequence
aagatccgtgtggaatactggttcgcggcctgccggtatgcatccgagcgcaccatctgaaagtatgcccgctcttcgcagcgggctttttgattgcc

SEQ ID NO: 31616 - DNA, 109 bp, Unknown
  Description of Unknown: RightRegion for integrase B5617 sequence
agctccaccatacgtaacaggcaggtagatattcgtatctacctgcctttttatttctagtccgcaccgcggagaatcgaactctgtgcagggcgcgggcgtaaagaaa

SEQ ID NO: 31617 - DNA, 260 bp, Unknown
  Description of Unknown: RightRegion for integrase B5618 sequence
aaaatccgcgtggagtattggttcgcgtcctgccggtactcatccgagcgcaccacttgaaatcatgcccgctcgttcgagcgggctttttgatgcaaaaagcagcctccctcgcgggcaggctgcctttttgtatcaggactccccgttctcgaggatgtcctgtatcttcgtcttcatgatgtcgaaggccacatcgttgaggccgctgttgatgacgatgtcggcgagattcttcgtcggctcgacgtagagatagt

SEQ ID NO: 31618 - DNA, 260 bp, Unknown
  Description of Unknown: RightRegion for integrase B5619 sequence
agctccaccataagtaccaggcaggtagatacttatatctacctgcctttttatttctagtccgtatcgcggagaatcgaactctatgcagggcgcgagcgttaagcaaacgcggagcgtttgtagcgagcgggcgaggacgccggcaggcggccgaagccggtgcgtatttgcgaagcaaatacgcggattctccgcgcaaagcctcgactagatatagacgcgatgccgatcgtactgcagcctgccgtgccccgcat

SEQ ID NO: 31619 - DNA, 98 bp, Unknown
  Description of Unknown: RightRegion for integrase B5620 sequence
aaccccgtcaacaaaatgttgacagggtgttcgagtagcattgctatggtgacccggtagggattcgaaccctagacctactgattcgtagtcagtca

SEQ ID NO: 31620 - DNA, 109 bp, Unknown
  Description of Unknown: RightRegion for integrase B5621 sequence
aaccccgtcaacaaaatgttgacagggtgttcgagtagcattgctatggtgacccggtagggattcgaaccctagacctactgattcgtagtcagtcactctatccagc

SEQ ID NO: 31621 - DNA, 260 bp, Unknown
  Description of Unknown: RightRegion for integrase B5622 sequence
aaagaaaagggctggaaaccaaaccaattcataattaaacttagatttaaaaattgttaattttatgtatacaaattgattaatgctgtgaacagcattaaataatttatatacattattttgcaaaataaaacaccccttaaaactgtaagcaaaacagcattaaggggtggaattaaattatttaactaaacgctcggaactattgtgtatcaggctcccatttgggcataacgataacggttttataagtgctgcac

SEQ ID NO: 31622 - DNA, 77 bp, Unknown
  Description of Unknown: RightRegion for integrase B5623 sequence
gacaaaataaaagtggttttgttggtgacccaagagagattcgaactcccgacaccttgattcgtagtcaagtgctc

SEQ ID NO: 31623 - DNA, 260 bp, Unknown
  Description of Unknown: RightRegion for integrase B5624 sequence
ggaaaaagaaacggtaaaggaatgtataattttaagttgaatatttatttaaagatatagagtttttttctatatctttttatttctatcatttacgagctaacgaacttgctcatgttgaaattattagtacccttttctatcaacttaccaatggtctaacacctcaagaaattaaagaaggtggattagatgcctattttactgatcatacattaggtgtctatccaacaaatagtgcgggtattccttttagtgcc

SEQ ID NO: 31624 - DNA, 260 bp, Unknown
  Description of Unknown: RightRegion for integrase B5625 sequence
gcactttccagcgcgtcggataggtgttcggataagcgcacgtcaagaccaccattatagtcacgattgcatatgcagtcgtgactttttctgtttatgataattcccatatctatacggtgttttagacaaaacgataatcatttatgtagtaaaaaatgcttcaatataaatcatataaccgtacacagaataacccaccatatacccaaaaactcccattccaatcggattttttagcggtgtgagtatgcatacgg

SEQ ID NO: 31625 - DNA, 109 bp, Unknown
  Description of Unknown: RightRegion for integrase B5626 sequence
ggaaaaagaaacggtaaaggaatgtataattttaagttgaatatttatttaaagatatagagtttttttctatatctttttatttctatcatttacgagctaacgaact

SEQ ID NO: 31626 - DNA, 239 bp, Unknown
  Description of Unknown: RightRegion for integrase B5627 sequence
gaggaggccctgggcgaagggttcgacaagcgctcttccggctccaccaaaacaatataatccgaaccttttgccgattggtcatgggttcggatttgttgtttctgttgaggaaattgaagactggtagctttgtctcgattcttgacacaatgcttgctgaacagccgtctgctcaaggtgttcttagggtgtatctgaaaactcccaacgcacccggacagcgggcctttttgcgg

SEQ ID NO: 31627 - DNA, 260 bp, Unknown
  Description of Unknown: RightRegion for integrase B5628 sequence
tactataaacctaaagaaagacttgctcaaatcactttggaagtgaaatttaaaatataattggtatccccatacggattattgtttgtcagtatgatgatacatgtagaattaccccataaaaacatctttattacattatataacaaaaggctaaggaaaataacttccctagccttattttattaataatagtggtattatagctgttgcaaataatactcctaatacaaagtatcctaatcttaataatatatcta

SEQ ID NO: 31628 - DNA, 260 bp, Unknown
  Description of Unknown: RightRegion for integrase B5629 sequence
atgcagcgttttgaagacggggaggagttcggatgccgtgcgtctcgctccaccaaatagtgcaaatccgaactcattctttttcgtgaagcactgtgtcggatttgttttcatagtagaggacgtaggttaaactgcgtcctcttttttaggtgtctcgtaagtaagagcctgtttggaatctccaatgccagcagtggtcgggtcagtcacgataccgagaatcgtgaggactgcgaacagggcatttacgactgcca

SEQ ID NO: 31629 - DNA, 260 bp, Unknown
  Description of Unknown: RightRegion for integrase B5630 sequence
aaaatcgaagtcaaatgcggcgaaatacaaatctattggaaatataattttgagttgtagtgagtattgggccttgagagcataccctcagcatctgtgcatgatctggcttggcaggaggcggtggagcatagtcagtcagcacagcttgctggacggacatctatcattcaataaattgatccggccaatcacaaacaattggccggatatagtgaaatgctttccttatatttatcttggccgttcctgcatccaac

SEQ ID NO: 31630 - DNA, 109 bp, Unknown; identical to SEQ ID NO: 31625
  Description of Unknown: RightRegion for integrase B5631 sequence

SEQ ID NO: 31631 - DNA, 260 bp, Unknown
  Description of Unknown: RightRegion for integrase B5632 sequence
atgcagcgttttgaagacggggaggagttcggatgccgtgcgtctcgctccaccagataagcccgatggttttgatacgaaaccatcgggctttttatttgcaatcagcatgatcatctgatataattaattcgaagtcggagtttgtggaggtgttttatgaaactattatttataatcggcgatactgctgttgggaaaatgacagttggtcaggaactaatgaaaataacggatttaaggctctttcacaatcacat

SEQ ID NO: 31632 - DNA, 260 bp, Unknown
  Description of Unknown: RightRegion for integrase B5633 sequence
gaggatgccctgggcgaagggttcgacaagcgctcttccggctccaccaaaacaatataatccgaaccttttgccgattggtcataggttcggatttgttgtttctgttgaggaaattgaagactggtagctttgtctcgattcttgacacaatgcttgctgaacagccgtctgctcaaggtgttcttagggtgtatctgaaaactcccaacgcacccggacagcgggcctttttgcggtgcgccgcgtcatttttcctt

SEQ ID NO: 31633 - DNA, 260 bp, Unknown
  Description of Unknown: RightRegion for integrase B5634 sequence
gtgcacgtcacggcctggggtttcgtcgcggcggtgcgcctgcctatgcttggggcatgatctcctgctcgccgtcctcgtccatgtacggcatgaggaacacgccgccctgctcggtggtaagcagcaggtactcgcggttgtgctcgtcgcacacgatttcctggccgatgccctcgggcaggtcgtatatggggccgtccgtgcgggcttgcctcacggtcacgtcttgcgctcccatggcctgcgacgcgcagctg

SEQ ID NO: 31634 - DNA, 94 bp, Unknown
  Description of Unknown: RightRegion for integrase B5635 sequence
agacctgaccaaagaaataatgactttaaagtggttatatcccctaaattactgcgttaggcaattacatacaacatgcctaacgcaattcatt

SEQ ID NO: 31635 - DNA, 260 bp, Unknown
  Description of Unknown: RightRegion for integrase B5636 sequence
gaggaggccctgggcgaagggttcgacaagcgctcttccggctccaccaaaacaatataatccgaaccttttgccgattggtcatgggttcggatttgttgtttctgctgaggaaattgaagactggtagctttgtctcgattcttgacacaatgcttgctgaacagccgtctgctcaaggtgttcttatcgttcgacgcaacagagatgttgcaaaaggaactggtgcattgctgtctccgaatgattggagtttggga

SEQ ID NO: 31636 - DNA, 260 bp, Unknown
  Description of Unknown: RightRegion for integrase B5637 sequence
aacaccttgtttttcgtaaaacattgtttcgggtttgtgatgataatagaggaagtctgacttgcgtcaggcttcctcttttttcccgttgaagtagttaaagtagttgttcttggctttttgcgtgtaacttttgctaaatacgcgcgtattaagagaaagtttacgcaaaaactgattttccactactttaactacttctccatttgcttcaactgcaacacggcagactcaataaggttctcaatttcagccgtatt

SEQ ID NO: 31637 - DNA, 109 bp, Unknown
  Description of Unknown: RightRegion for integrase B5638 sequence
agctccaccataagtaacaggcaggtagatattcgtatctacctgcctttttatttctagtccgcaccgcggagaatcgaactctgtgcagggcgcgagcgttaaacaa

SEQ ID NO: 31638 - DNA, 260 bp, Unknown
  Description of Unknown: RightRegion for integrase B5639 sequence
gatatagagggagtaagatatcactcaaaagtcaaattagatgtttattttaaattttaagcgaggtgtttcagatgcaagaaaatgaaacttatgtaatctatttgagaaagtctcgtgcagatagcgaaaaatttagtttagaagaagtatttgcaaaacatgaatcagaactccagtcactcgcagaacgtactttgggtaatcgtattcctgtggataaaatctttcgagaggtcgtatctggcgaaacaatcaca

SEQ ID NO: 31639 - DNA, 260 bp, Unknown
  Description of Unknown: RightRegion for integrase B5640 sequence
agaacatacggaagaggagaaacgtacagtgtagtgaccggcgatgttgtacggatataggggatcattccgggaatgattccggtaccgaagaattggttccgccatgatgtcaatgataaataagcaaaaaaggaagcacacctgaagaattccaggtgtgctttaaagttatttgccggttgttctgctttttgtacgcggcgggtcattcggtacccactctataatctcagacggttggcaatgtaacgcctcac

SEQ ID NO: 31640 - DNA, 260 bp, Unknown
  Description of Unknown: RightRegion for integrase B5641 sequence
gaggaggccctgggcgaagggttcgacaagcgctcttccggctccaccattgaagtataatccgaacaccctattctttatagggacactgttcggacaaacaacaaaacaccgagtagagtaacaagctctgcccggtgttttgttgttggtgggtagagcgggtagagaaaaatcgcaatttcccataaactctcttatagtagctctcttatagactactttatgaaaaatacagatttactctacccactctaccc

SEQ ID NO: 31641 - DNA, 77 bp, Unknown; identical to SEQ ID NO: 31622
  Description of Unknown: RightRegion for integrase B5642 sequence

SEQ ID NO: 31642 - DNA, 260 bp, Unknown
  Description of Unknown: RightRegion for integrase B5643 sequence
atatttaaagaaataacttatgatcctaaagaggatacatttgaattctcatttaaatagcggacttttgttcgttatttttttggtttaaattgaaagtgtaggacatccacctctaatataaccagtatatttagttatatccttaacatgtatcatttcaactttcttttctcctgctacctttgctgcttttttcaaatctaactcttctgcaactggaattacaaaaacataaaattccttagataacccttgag

SEQ ID NO: 31643 - DNA, 260 bp, Unknown
  Description of Unknown: RightRegion for integrase B5644 sequence
cttcctgaacagcgaaatgacgaatttgagcttattatttattcaaaattattaacttaaaaaaattaccctacatataacatatgtagggtaattcattcccttatatatgttatatgttatttctttttactctttttattttctattttctcgatcacttctaaaaaagtattgatatattccttcatctgcaatctccttctcattaataattagttataataagttctttatattttcctcttcccttctcatct

SEQ ID NO: 31644 - DNA, 109 bp, Unknown
  Description of Unknown: RightRegion for integrase B5645 sequence
agctccaccaatagttacaggcaggtagatacttatatctacctgcctttttatttctagtctgtaccgcggagaatcgaactctgtgcagggcgcgggcgtaaagaaa

SEQ ID NO: 31645 - DNA, 72 bp, Unknown
  Description of Unknown: RightRegion for integrase B5646 sequence
gacaaaataaaagtggttttgttggtgacccaagagagattcgaactcccgacaccttgattcgtagtcaag

SEQ ID NO: 31646 - DNA, 260 bp, Unknown; identical to SEQ ID NO: 31631
  Description of Unknown: RightRegion for integrase B5647 sequence

SEQ ID NO: 31647 - DNA, 260 bp, Unknown
  Description of Unknown: RightRegion for integrase B5648 sequence
aaagaccatacaatcattatagaattaaagaatggtatgttgcttgaagaggctttgtaaccgtattgaaatcgaaacggttaaactggtcgaattcgaccggattagaataaatatagcatatttttagaaaaaagcgcgttttggcggcataaaaccattgacataatatattttatcggatataatgatatgatttagcggaataaccgctatttggcaggtatgggataagaggagatgttttatgcatgattttt

SEQ ID NO: 31648 - DNA, 260 bp, Unknown
  Description of Unknown: RightRegion for integrase B5649 sequence
actcgaactcgcgagcccttcgtcgctgatgggtatattatactgcccattgccatataaagcaaaagaagcccggcacgatgccgggcttctctctttagtcttccatgtatttgccagcgatccagagcgcgaccgttccggcgcccagcggaccgatggccacgatggcgatcagtatggccacaatcagcacttccatggtgtcctccttagctgagcagcttgttgaccttggcctgcacccgggcgtagtcata

SEQ ID NO: 31649 - DNA, 260 bp, Unknown
  Description of Unknown: RightRegion for integrase B5650 sequence
gctttaatcaaagttatcaaggtggcaaacgggaatattgaaatcgtatggaaaatctaaggcggttttatccgctatcatttttgaggtaaatctacttcaatcttcccgtttcggtgaaaccctccgaatcacccaggaaaaactggacagccgcaatttctatgcctttaatccggcctttgatccggatcaggcgccccagccccgataagcagcccttaatccagctgtatccggactccgccaaggagctttac

SEQ ID NO: 31650 - DNA, 260 bp, Unknown
  Description of Unknown: RightRegion for integrase B5651 sequence
aataaggacggaaatgtgcgtataatcctgaaaaagctcgatgatttggatatactttaattgctttacctatttggtgcggatagtagaaataaccgcccacaattagataggtagaatcaaccaaaaccaacctatatcacataaggggacaagccatttttaccgcttgttccctttttatatcccgattacccgcctaaatgtaaaagtatagccatctggtattccatggtgtgaagatattccaagcgctgtat

SEQ ID NO: 31651 - DNA, 109 bp, Unknown
  Description of Unknown: RightRegion for integrase B5652 sequence
gacaaaatattaataagagatgacgaaattgatatacagtggaaagtgtttaatcaataatattttctataattctccctttacttccatagctataggtgattctgta

SEQ ID NO: 31652 - DNA, 260 bp, Unknown
  Description of Unknown: RightRegion for integrase B5653 sequence
atatttaaaaagattgtttatgaccctgaaacaaatgatttagatgttacctttatgtgacatctttttgtctaaataaactgtggtgaacatccacctatgtttatttagacaaaactattttattagattttcaaatttaccagatactacttctactaagtcattgggatttaattttatttgatgtcctatctttcctgcacttactatcatgaaatctaagcctttagcactctcatgtataaatgttctgtaat

SEQ ID NO: 31653 - DNA, 260 bp, Unknown
  Description of Unknown: RightRegion for integrase B5654 sequence
aaaaaaataaatcatatagacgtcgattattacttgatagaaaccccggaagccttataaaacaaggccatccggggctttttaaataatgtatacgctcttgccatttggtcatccagttggggcactggacctggcgtccgtcacagtactgggtcaggataggctgtctcaccccgggacgggacaggtagttgtcaaatatctcatccactatcaggttgatgctctcaaatatatttctcccgtatatccacttg

SEQ ID NO: 31654 - DNA, 260 bp, Unknown
  Description of Unknown: RightRegion for integrase B5655 sequence
gtctatgacagtgagaagaaagaattaagcatttatctctactgctccgacaccctctaaacccgcataaaataaggctttagacgtactacatacgcaaatgggaaaaggttgactcagtggggttcaaaatacttagccgaccagggatattccaccattgagattctgcgctactattacggcagcagtatgtatatcaacacggcggatgaaatcagtggtgtgcctgcttcctggccgggcagcaaccttgaggt

SEQ ID NO: 31655 - DNA, 149 bp, Unknown
  Description of Unknown: RightRegion for integrase B5656 sequence
aaaaaaacaaagcccgccgatttcacgcttgaaatcaaattaaagcaggcttttctttaagttgtttaatttcctctaccttgcatagtgttattcataatattgtgcaaggtagaatttttttatttttttcaaaaaagcgttgacaa

SEQ ID NO: 31656 - DNA, 260 bp, Unknown
  Description of Unknown: RightRegion for integrase B5657 sequence
tattataaagaaaaaaagagatttgcacagtttactttggaggttaaatttaaaatataattggtatccccatacggattattgtttgtctgtatgtggatacatgtaaaattacccctaagaaatatattattactataattatacaataaaaggctaaggaaaataacttccctagctttttaatttataacgcataatcataattaaatatttattataaaatcatttattgtcgataatttattgaaaaatattcc

SEQ ID NO: 31657 - DNA, 260 bp, Unknown
  Description of Unknown: RightRegion for integrase B5658 sequence
atatttaaaaagattgtttatgatcctgaaacaactgatttagatgttaccttcatgtaacatctttttgtctaaataaactgtggagaacatccaccacgaatatatccagtatatttcattatatccttaactgctatcatttcaaccttcttttctccagctatcttagcagcattttttaaatctaattcttctgcaactggtataacaaaaacataaagctctttgcttgttccttgagctactaatgttttaaa

SEQ ID NO: 31658 - DNA, 260 bp, Unknown
  Description of Unknown: RightRegion for integrase B5659 sequence
aaaaaaacaaatcatatagacgtcgattattacttgatagaaaccccggaagccttataaaataaggccatccggggctttttaaataatgcatacgctcttgccatttggtcatccagttaggacactggacctggcgtccgtcacagtactgggtcaaaataggctgtctcacacccggacgggacaggtagttgtcaaatatctcatccacagtcagactgatgctctcaaatatatttcttccatatatccacttg

SEQ ID NO: 31659 - DNA, 109 bp, Unknown
  Description of Unknown: RightRegion for integrase B5660 sequence
ttatttaaagaaattatatatgatcctgaaactgattctttagatgttactttcatgtaacatctatttttgtctaaataaacattgtagaacatccaccacgaatata

SEQ ID NO: 31660 - DNA, 260 bp, Unknown
  Description of Unknown: RightRegion for integrase B5661 sequence
tattataaagaaaaaaagagatttgcacagtttactttagaggttaaatttaaaatataaactttttacatgtatcaacatacggattattgtttgtctgtcccatgatacatgtagaattgccccataaaaacatctttattacattatacaataaaaggctaaggaaaataacttccctagccttattttattagcaacaatggtattatagctgttgcaaataatactcctaatacaaagtatcctagtcttaataa

SEQ ID NO: 31661 - DNA, 260 bp, Unknown
  Description of Unknown: RightRegion for integrase B5662 sequence
ggcgaaaataccgaaacggaggggtgttcatccttgatgacacccgctccaccattatagtcacgactgcatatgcagtcgtgacttttttagtatatgattattcaaatatttatgcgttttttatagcaaaacaagaatcatttatgaagtataaaacaacacaatataaattatgcaaccgtacacaaaattttatgggatgcctttattttgcgttatttctttttcatacagtttttaaaacattttttatcaaa

SEQ ID NO: 31662 - DNA, 260 bp, Unknown
  Description of Unknown: RightRegion for integrase B5663 sequence
gtctatgacagtgaaaagaaagaattaagcatttatctctactgctccgacaccctctaaacccgcataaaataaggctttagacgtactacatacgcaaatgggaaaaggttgcccttttgggttttgcgtatgtagtaaaaatttaatgcttttcatactcaaaaaatgccgtatttactgctgattcaaccaatgctgaaatgccttaatgcaacttgatggtttacttaaaactccgtctgcgactgttcccatct

SEQ ID NO: 31663 - DNA, 260 bp, Unknown
  Description of Unknown: RightRegion for integrase B5664 sequence
actcgaaccccgaagatcatcgtgctgcgggactatgtcgtccttagaattgccgtataaagcaaaagagccccggcgggtgccggggctctcttagtctatcatgtatttgctggctgttgtgacagcgcagcaggctcccaggaatatgagagccgccacgctgatcaggacgatcatgccacgcccaggatcttcttggtcctgttcagaacgtcagcaggatccaggccggagcccttcaccttgccggcgatctc

SEQ ID NO: 31664 - DNA, 74 bp, Unknown
  Description of Unknown: RightRegion for integrase B5665 sequence
gaaagttcgcttttaaatgatttggtgacccagaagggattcgaacccctggccttttgattcgtagtcaaacg

SEQ ID NO: 31665 - DNA, 260 bp, Unknown
  Description of Unknown: RightRegion for integrase B5666 sequence
actcgaaccccgaagatcatcgtgctgcgggactatgtcgtcctcagaattgccgtataaagcaaaagagccccggcgggtgccggggctctcttagtctatcatgtatttgctggctgttgtgaccgcgcagcaggctcccaggaatacgagagccgccacgctgatcagggcgatcatgccacgcccaggatcttcttggtcctgttcagaacgtcagcaggatccagtccggagcccttcaccttgccggcgatctc

SEQ ID NO: 31666 - DNA, 260 bp, Unknown
  Description of Unknown: RightRegion for integrase B5667 sequence
ggcctgattatttcaatcagcgcaactagcgaccacgttcaagtagagtggaaaatctaagctctaacttctggattatcccactctacttactttcaaatctatcttttctttttaatcttgtttgtaccccttgtacaccgttgcttccgaactttccgaactatttttatttaatttgcatttttttaagatatcggtcacggatcaccagcctcggatagtctggatttcccgcatatccaattttcatcgcaatc

SEQ ID NO: 31667 - DNA, 260 bp, Unknown
  Description of Unknown: RightRegion for integrase B5668 sequence
actcgaacaccgaagatcatcgtgctgcgggactatgtcgtcctcagaattgccgtataaagcaaaagagccccggcgggtgccggggctctcttagtctatcatgtatttgctggctgttgtgacagcgcagcaggctcccaggaatacgagagcagccacgctgatcagggcgatcatgccacgcccaggatcttcttggtcctgttcagaacgtcggcaggatccaagccggagtccttcaccttcccggcgatctc

SEQ ID NO: 31668 - DNA, 109 bp, Unknown
  Description of Unknown: RightRegion for integrase B5669 sequence
gacaaagtattaataagagataacgaaattgatatacagtggaaagtgtttaatcaataatattttctataattctccctttacttctatagctataggtgattctgta

SEQ ID NO: 31669 - DNA, 260 bp, Unknown
  Description of Unknown: RightRegion for integrase B5670 sequence
gtggacaatgctccgccaacaaaaggcatcagctcaggctggtgccttttttgcggctagatggtgcggatgagaacagggcggcgattttcgatgtgcagcacaaatccatcagcctcccaaaagtgcccatccaacagaacctcgccctgaaatgtaatccggcggagcttctgtgcggcgtcggtcacctcaacggtgcaaaagcgctgcaagtagctgcaaatagcggcggcgtgggagacgacaagggcgttctg

SEQ ID NO: 31670 - DNA, 260 bp, Unknown
  Description of Unknown: RightRegion for integrase B5671 sequence
gtctatgacagtgaaaagaaagaattaagcatttatctctactgctccgacgccctctaaacccgcataaaataagactttagacgtactacatatgcaaatgggaaaaggttgactcagtgggggtcgaaatacttagccgaccagggatattccaccattgagattctgcgctactattacggcagcagtatgtatatcaacacggcggatgaaatcagtggtgtgcctgcttcctggccgggcagcaaccttgaggt

SEQ ID NO: 31671 - DNA, 260 bp, Unknown
  Description of Unknown: RightRegion for integrase B5672 sequence
actaaaactgaaaaggggaaagattatgaaattaaactttttcctaaacttcgtaaataagtctaggtggcttatttacttggtttaatccaactacatataacatactaggtatatttcattaccttccttatctactcctataggatcttgaaggaatacttctccctttgtcttcttagtattcctaaaaaacataagtatttcattgtctatacacttagctgcatatgttgcaagtcgtattcccttgttagtgt

SEQ ID NO: 31672 - DNA, 260 bp, Unknown
  Description of Unknown: RightRegion for integrase B5673 sequence
ctctctgaaaatgggctttccgttagctttaatattaaaaacggcggtcacaaaccttgatttttcaaggattctgaccgcctttctttttgttgtgggtgtatcagcgttggaaataaaaatactcccacaatggattactctatttgctcaccaccataaatcagtgtaactctattatatgttcctataaactcctctacaaaactattatattcatctatttttttgatttcccaatagttgtacaattttttgtt

SEQ ID NO: 31673 - DNA, 75 bp, Unknown
  Description of Unknown: RightRegion for integrase B5674 sequence
gaaagttcgcttttaaatgatttggtgacccagaagggattcgaacccctggccttttgattcgtagtcaaacgc

SEQ ID NO: 31674 - DNA, 260 bp, Unknown
  Description of Unknown: RightRegion for integrase B5675 sequence
gtctatgacagtgagaagaaagaattaagcatttatctctactgctccgacaccctctaaacccgcataaaataaggctttagacgtactacatacgcaaatgggaaaaggttgactcagtggggttcgaaatacttagccgaccagggatattccaccattgagattctgcgctactattacggcagcagtatgtatatcaacacggcggatgaaatcagtggtgtgcctgcttcctggccgggcagcaaccttgaggt

SEQ ID NO: 31675 - DNA, 260 bp, Unknown
  Description of Unknown: RightRegion for integrase B5676 sequence
ccgtatcaatctttagcggtacctttttgggttcgagcaaaattacattatttttcctaactccccaaaagcaagctgtattattcctaatccacaaattttctaccgaacaaaaataattaaaaaatatgttgacatttatgtagcattcgcatatactaaatgtatgagatagacctcgacgcgcctcttaacaatgcgtaccatgtcggggtcgcttttttaggagttgagatgatttgcccgaaaaaatgttaaaa

SEQ ID NO: 31676 - DNA, 260 bp, Unknown
  Description of Unknown: RightRegion for integrase B5677 sequence
actcgaaccccgaagatcatcgtgctgcgggactatgtcgtcctcagaattgccgtataaagcaaaagagccccggcgggtgccggggctctcttagtctatcatgtatttgctggctgttgtgaccgcgcagcaggctcccaggaatacgagagccgccacgctgatcggggcgatcatgccacgcccaggatcttcttggtcctgttcagaacgtcagcaggatccagtccggagcccttcaccttgccggcgatctc

SEQ ID NO: 31677 - DNA, 260 bp, Unknown
  Description of Unknown: RightRegion for integrase B5678 sequence
ttatttaaagaaattatatatgatcctgaaactgattcgttagatgttactttcatgtaacatctattttatttttgtctaaataaacattggagaacatccaccacgaatatatccagtatatttcattatatccttaactgctatcatttcaacctttttttctccagctatcttagcagcattttttaaatctaattcttctgcaactggtataacaaaaacatataactctttgcttgttccttgagctactaatg

SEQ ID NO: 31678 - DNA, 260 bp, Unknown
  Description of Unknown: RightRegion for integrase B5679 sequence
cttgaggaggccctgggcgaagggttcgacaagcgctcttccggctccaccaaaaaataagagacacgcgaaagcgtgtctcttattttttgggttcactcatttcattcgttcaccccaagggtaattaaaatgctcgatggaaatgaatcccacctccgccaagattttgctgcgcaaaatgcttgcacggcgcaaatgcgccggttttggtatccgtaggacatttaacagcgcacaaacaaatgaattgcttgtgc

SEQ ID NO: 31679 - DNA, 67 bp, Unknown
  Description of Unknown: RightRegion for integrase B5680 sequence
aatttaaaaatggtgggcatgaagagactcgaactcccacgctttcgcactagttcctaagactagc

SEQ ID NO: 31680 - DNA, 260 bp, Unknown
  Description of Unknown: RightRegion for integrase B5681 sequence
actaaaactaagaaaggaaaagattacgaaattaaactttttcctaaacttcgtaaataagcctaataggcttatttacttgcttcaatccaattacatacaacatattagatatatttcatttccttccttatccactcctataggatcttgaaggaatacctctccctttgtcttcttggtgttcctaaagaacataagtatttcattatctatacacttagctgcatatgttgcaagtcgtattcccttattagtat

SEQ ID NO: 31681 - DNA, 109 bp, Unknown
  Description of Unknown: RightRegion for integrase B5682 sequence
gtctatgacagtgaaaagaaagaattaagcatttatctctactgctccgacaccctctaaacccgcataaaataaggctttagacgtactacatacgcaaatgggaaaa

SEQ ID NO: 31682 - DNA, 260 bp, Unknown
  Description of Unknown: RightRegion for integrase B5683 sequence
actcgaactccggagatcttcgtgctgcgggactatatcgttctaaaaattgcagtataaagcaaaagagccccggcacctgccggggctctcgcttattccatatacacgccggccgcagtgatcgcgcagccggcagcgccgacgctgatgatcaggagcgcagcggctccgatcagcgccatcatgccacgcccaggatcttctcgaccctgttcaggatgtcctcgggatccaggccggagcccttcaccttgccg

SEQ ID NO: 31683 - DNA, 260 bp, Unknown
  Description of Unknown: RightRegion for integrase B5684 sequence
actcgaaccccgaagatcatcgtgctgcgggactatgtcgtcctcagaattgccgtataaagcaaaagagccccggcgggtgccggggctctcttagtctatcatgtatttgctggccgttgtgacagcgcagcaggctcccaggaatacgagagccgccacgctgatcaggacgatcatgccacgcccaggatcttcttggtcctgttcagaacgtcagcaggatccaggccggagcccttcaccttgccggcgatctc

SEQ ID NO: 31684 - DNA, 260 bp, Unknown
  Description of Unknown: RightRegion for integrase B5685 sequence
gtctatgacagtgagaagaaagaattaagcatttatctctactgctccgacaccctctaaacccgcataaaataaggctttagacgtactacatacgcaaatgggaaaaggatgactcagtgggggtcgaaatacttagccgaccagggatattccaccattgagattctgcgctactattacggcagcagtatgtatatcaacacggcggatgaaatcagtggtgtgcctgcttcctggccgggcagcaaccttgaggt

SEQ ID NO: 31685 - DNA, 260 bp, Unknown
  Description of Unknown: RightRegion for integrase B5686 sequence
atatttaaaaagattgtttatgaccctgaaacaaatgatttagatgttacctttatgtgacatctttttgtctaaataaactgtggtgaacatccaccacgaatatatccagtatatttcattatatccttaactgctatcatttcaaccttcttttctccagctatcttagcagcattttttaaatctaattcttctgcaactggtataacaaaaacatataactctttgcttgttccttgagctactaatgttttaaa

SEQ ID NO: 31686 - DNA, 260 bp, Unknown
  Description of Unknown: RightRegion for integrase B5687 sequence
ttatttaaagaaattatatatgatcctgaaactgattcgttagatgttactttcatgtaacatctatttttgtctaaataaacattggagaacatccaccacgaatatatccagtatatttcattatatccttaactgctatcatttcaaccttcttttctccagctatcttagcagcattttttaaatctaattcttctgctactggtataacaaaaacatataactctttgcttgttccttgagctactaatgtttta

SEQ ID NO: 31687 - DNA, 260 bp, Unknown
  Description of Unknown: RightRegion for integrase B5688 sequence
tattataaagaaaaaaagagatttgcacagtttactttggaggttaaatttaaaatataacaggtatcaacatacggattattgtttgtctgtcctatgatacatgtagaattaccccataaaaacatctttattacattatataacaaaaggctaaggaaaataacttccctagccttattttattaataatagtggtactatagctgttgctactaatactcctaatacaaagtatcctagtcttaataatatatcta

SEQ ID NO: 31688 - DNA, 260 bp, Unknown
  Description of Unknown: RightRegion for integrase B5689 sequence
actcgaaccccgaagatcatcgtgctgcgggactatgtcgtcctcagaattgccgtataaagcaaaagagccccggcgggtgccggggctctcttagtctatcatgtatttgctggctgttgtgacagcgcagcaggctcccaggaatacgagagccgccacgctgatcagggcgatcatgccacgcccaggatcttcttggtcctgttcagaacgtcagcaggatccaggccggagcccttcaccttgccggcgatctc

SEQ ID NO: 31689 - DNA, 260 bp, Unknown
  Description of Unknown: RightRegion for integrase B5690 sequence
aaaggcggcacgttgtcggatttcgcttccaatgcaccagcattcaccaggcggatttgatgtaattgcccactgccgtaactgtctttctgattatgaatggttctgtgataaggatggcggtgtctctgatatgaagcagtatttcttcgggtaaggcgagcataaatctcagttagcgttttggggcgtatctctttatctctggcaactcacctgaactactactaattcggaaaattttacacacatttagccat

SEQ ID NO: 31690 - DNA, 260 bp, Unknown
  Description of Unknown: RightRegion for integrase B5691 sequence
tataacaaagaaaaaaagagatttgcacaatttactttggaggtcaaatttaaaatataggactatttacaggtatcaccacacagattattgtttgtctgtatcatgatacctgtaaaaccatcccataaaaacatctttattgtataatatgaataatatagcacttgctactccaattcctaagtatgctatgcgtcctgctacttctaatgctagttttttcatgccgacacctcctttattagagtatcaactat

SEQ ID NO: 31691 - DNA, 260 bp, Unknown
  Description of Unknown: RightRegion for integrase B5692 sequence
aaaggcggcacgttgtcggatttcgcttccaatgcaccacctatgaatcctcttgtatgactttttgtttgtatcaccctccggaatctcaagcatttttctgagtccagctttcggtttgaagtaccgattagcatctggatgattttccacatcgttcttttcaaaccagtactgtactgtaagttctttttctattccatcagggcattcgctaacagaaccttccacaaatggggtcatatccggccattgttcat

SEQ ID NO: 31692 - DNA, 109 bp, Unknown
  Description of Unknown: RightRegion for integrase B5693 sequence
gtctatgacagtgagaagaaagaattaagcatttatctctactgctccgacaccctctaaacccgcataaaataaggctttagacgtactacatacgcaaatgggaaaa

SEQ ID NO: 31693 - DNA, 260 bp, Unknown
  Description of Unknown: RightRegion for integrase B5694 sequence
tcgttcgcctgctgcaaggaatggggagccaaaacaaaaacatacaaaccgtttcgataatatgcggctgtatggtaatcaaaaagcgtcgggaataacttctcggcgcttttacttttccctaaacaagaaatctcccgccctcaaacgagagcgggagaaaattttatttatcctcttttgaacctatctgcatatcagcagcctcttccgtctttgattttatgtttttcgccaacttgagcaaaaatggcggcaga

SEQ ID NO: 31694 - DNA, 260 bp, Unknown
  Description of Unknown: RightRegion for integrase B5695 sequence
ggtttgatctctacgatcaaggccaccagcgaccgtgttcagatagagtggaaaatctgacatttccgctctatcgcccctcatttctattttatcttgtttgtaccccttgtacaccgatgtttgttttgcatgtgaaaaatatgagataagagttatttttagggtaccattctgtgtgctacattcccagagaaaccagaggaatgaagataaacaatgtcagaatgggaatcaaaatctgtgtgacagcaatatca

SEQ ID NO: 31695 - DNA, 96 bp, Unknown
  Description of Unknown: RightRegion for integrase B5696 sequence
gaaagttcgcttttaaatgatttggtgacccagaagggattcgaacccctggccttttgattcgtagtcaaacgctctatccagctgagctactga

SEQ ID NO: 31696 - DNA, 72 bp, Unknown
  Description of Unknown: RightRegion for integrase B5697 sequence
gaaagttcgcttttaaatgatttggtgacccagaagggattcgaacccctggccttttgattcgtagtcaaa

SEQ ID NO: 31697 - DNA, 260 bp, Unknown
  Description of Unknown: RightRegion for integrase B5698 sequence
actcgaaccccgaagatcatcgtgctgcgggactatgtcgtccttagaattgccgtataaagtaaaagaaccccggcgggtgccggggttcttttgctttatcatgtatttgctggcagcgccatcatgccacgcccaggatcttctcgaccctgttcagaacgtcagcaggatccaggccggagcccttcaccttgccggcgatctcctgcgccagcacgtcagcaggatccggctcggccggcttcgctgcgacgccc

SEQ ID NO: 31698 - DNA, 260 bp, Unknown
  Description of Unknown: RightRegion for integrase B5699 sequence
ctctctgaggatgggctttccgttagctttaatattaaaaacggcggtcacaaaccttgatttttcaagggttctgaccgcctttctttttgttgtgggtgtatccacatcccactgaatggtataatacccattctgctccgctgtttcaatcacatggttatcatattccccaaagggcgggcgaaacagttccatctccactcccgtaagcttcttcacgttttcatgacacttctgcaattcctgcgcgatttcct

SEQ ID NO: 31699 - DNA, 260 bp, Unknown
  Description of Unknown: RightRegion for integrase B5700 sequence
aacatactagagattttggagagagattatttaaatcttgataaaataagtcttgattagccatagtttattaaattatcggtggagactcttcataaaggctttaaaaataacatctgagataacttgattagctgtctcagtatcttttaaaagagtctcttcttctttttctaagtagttgagatattctgttaggcgttcctgtctttgttcttcacttagtagtgactcttctaaacctaacaactctaagaact

SEQ ID NO: 31700 - DNA, 260 bp, Unknown
  Description of Unknown: RightRegion for integrase B5701 sequence
ggcttgatctctacaatcaaggccaccagcgaccatgttcagatagagtggaaaatctgacatttccgctctatcgcccctcatttctattttatcttgtttgtaccccttgtacaccgatgtttgacactgctcatataaatgcagaaagagaacatggcgtttccaggaatgaagcggaaaggtttataaaagaagctgatatatctcttacacgctggaacggaagatttgtaaattattacggacctaatggagcc

SEQ ID NO: 31701 - DNA, 260 bp, Unknown
  Description of Unknown: RightRegion for integrase B5702 sequence
aaaaaaataaatcatatagacgtcgattattacttgatagaaaccccggaagccttataaaacaaggccatccggggctttttaaataatgtatacgctcttgccatttggtcaaccagattgcatgtgcgtatgagtaatttctatattataacattcaattttttcctctgcatttagatgtgtctcccctccagttcaatcccaatctccttcaacgatataataacattttttcaaaactttatcaatttctcttg

SEQ ID NO: 31702 - DNA, 260 bp, Unknown
  Description of Unknown: RightRegion for integrase B5703 sequence
acgaacggcgaagtattcatcaacttcagggaaacgggaattaagacatttaaggagtaaagatgacgatatgcagaaaaatcaatatatcggtcggagcgaaggggcggaatcgaatcctgactggagaagccgaaggactgcttgaattcaagtcaaagcccgacagggcggcggaaacgctttcgtttgcgattctatttgaatcgtggatcgaaagcggagttgcatcggattattccgacatcgccaaaattacg

SEQ ID NO: 31703 - DNA, 260 bp, Unknown
  Description of Unknown: RightRegion for integrase B5704 sequence
gtctatgacagtgaaaagaaagaattaagcatttatctctactgctccgacaccctctaaacccgcataaaataaggctttagacgtactacatacgcaaatgggaaaaggttgcccttttgggttttgcgtatgtagtaaaaatttaatgcttttcatgctcaaaaaatgccgtatttactgctgattcaaccaatgctgaaatgccttaatgcaacttgatggtttacttaaaactccgtctgcgactgttcccatct

SEQ ID NO: 31704 - DNA, 176 bp, Unknown
  Description of Unknown: RightRegion for integrase B5705 sequence
gataaagaagctaagaatgatgactttgaattaactatctacccaaaatttctaagatagataattacatacatcatcaacaacaaatttcattaccttctttgtccactcctattggatcctgagatcggaagagcgtcgtgtagggaaagagtgtagatctcggtggtcgccgt

SEQ ID NO: 31705 - DNA, 260 bp, Unknown
  Description of Unknown: RightRegion for integrase B5706 sequence
aaaggcggcacgttgtcggatttcgcttccaatgcaccagcagagagtcgccgaacatgaagttgacgccctcatcgtaggtggcggggtcattctggaacacgctgaacatcggctgccagatgggcaggccgttctcatgtgcgcgctccatcagggagtagagcgtcgggctgagcttgtagcggaagtcgatggccgccttgatgtactgcttcttgtcgctgtacatccagggctcggtcacggtgttgtcggtg

SEQ ID NO: 31706 - DNA, 109 bp, Unknown
  Description of Unknown: RightRegion for integrase B5707 sequence
gtctatgacagtgaaaagaaagaattaagcatttatctctactgctccgacaccctctaaacccgcataaaataaggctttagacgtactacatacgcaaattggaaaa

SEQ ID NO: 31707 - DNA, 260 bp, Unknown
  Description of Unknown: RightRegion for integrase B5708 sequence
actaaaactaataaaggaaaagattacgaaattaaactttttcctaaacttcgtaaataagtctaataggcttatttacttggtttaatccaattacatacaacatgttagatatatttcattcccttccttatccactcctataggatcttgaagaaacacttctccctttgtcttcttgctgttcctaaagaacataagtatttcattatctatacacttagccgcatatgttgcaagtcgtattcccttgctagtat

SEQ ID NO: 31708 - DNA, 260 bp, Unknown
  Description of Unknown: RightRegion for integrase B5709 sequence
gaagatggcttaaaataccgttttcgtggacaatttgtgcagattagcctcttacaatagaaacattatgccggaaactgggatgtacttagaccggcagcagaaatagaagaaatgaatacatttacggcagataatttaaatgcgttgcttcacgaagcggaagaaataatggaaggatggactgatacagatggaggagaacaaaacgagtgttccgatgaatgaacaggcagtagaaaatgatagagacgcgcgag

SEQ ID NO: 31709 - DNA, 260 bp, Unknown
  Description of Unknown: RightRegion for integrase B5710 sequence
gtctatgacagtgagaagaaagaattaagcatttatctctactgctccgacaccctctgaacccgcataaaataaggctttagacgtactacatacgcaaacggaaaaaggttgcccttttcggttttgcgtatgggggaaattctttattttttgtgacgaaataggggagaaattttgatatgccatatgatattttatatattatcacaatgtagaggaggtgacaatcttcatgcagaaatatgagcattttatag

SEQ ID NO: 31710 - DNA, 260 bp, Unknown
  Description of Unknown: RightRegion for integrase B5711 sequence
tcgttcgcctgctgcaaggaatggggaagtgaaaatgaaaaaaagcaaaaaaaaagttaaagcgatgtgtgcattaattatattaattatattttatctcataatagtaaattcaccactcaattatacatttgaagaaaacagcagtggatataccgttacaggacaaagaatatggtttcctttcatattggtacccaatgggtataactcagaaaaggttacaatagttggggctggtgcatttgagtggaatgaga

SEQ ID NO: 31711 - DNA, 260 bp, Unknown
  Description of Unknown: RightRegion for integrase B5712 sequence
ggcctgattatttcaatcagcgcaaccagcgaccacgttcaagtagagtggaaaatctgaacactcttgattttgccactctacttactttcaaatctaacatttctttttaatcttgtttgtaccccttgtacaccgatgcttaaaaaatggattgatactccggaactggagaaaaaccagaaattcattgcggattggcactattttctgaaggatacgcagtatatgcttcagaagccggagaatgaggcgaggag

SEQ ID NO: 31712 - DNA, 260 bp, Unknown
  Description of Unknown: RightRegion for integrase B5713 sequence
gaaaaaaatcaaaaaaatgataattttagtatagaactttaccctaagttgcctaaataaatatgcccttttactgttactattaaacatctaactggttatggggttaatagtaacagtaattggattattgttcaaaaatttcaacgtatttttcagaagaagttatataaactcctgattttaatttgtacatatctgttcctgttctttcaattttttgagctatagtaaatacatcaccttttttcacttttcct

SEQ ID NO: 31713 - DNA, 109 bp, Unknown
  Description of Unknown: RightRegion for integrase B5714 sequence
gtctatgacagtgaaaagaaagaattaagcatttatctctactgctccgacaccctctaaacccgcataaactaaggctttagacgtactacatacgcaaatgggaaaa

SEQ ID NO: 31714 - DNA, 260 bp, Unknown
  Description of Unknown: RightRegion for integrase B5715 sequence
gaatcagagagcagtggttcggatttgaacgcaaatgctccaccattcaaaaacctttgagccataacggcttgagggtttttctttttagcgcggcttaggccgtttgggagcccgtacagctttttgtgcctgatagaataggaaaaagatcgtgataaaggagtaagcctggatgcgcagggaagttcaaaacgccccggatgcaatcaaaattcggggcgggcgggtacacaacctgaaaaatatcgatgtggacg

SEQ ID NO: 31715 - DNA, 260 bp, Unknown
  Description of Unknown: RightRegion for integrase B5716 sequence
ctctctgaggatgggctttccgtcagctttaacataaaaaaaggtggtcacaaaccttgatttttcaaggattctgaccgcctttctttttgttgttggtgtatcagcgttggaaacaagaataattcttctggcataaacattatgtattcatctttccttctgtaaaatacggataatatctatatatcttgcgaaatttatttatttcatctaaagtaataccatgaaatttttctttattatattcttcatctgta

SEQ ID NO: 31716 - DNA, 260 bp, Unknown
  Description of Unknown: RightRegion for integrase B5717 sequence
ttatttaaagaaattatatatgatcctgaaactgatttgttagatgttactttcatgtaacatctattttatttttgtctaaataaacattggagaacatccaccacgaatatatccagtatatttcattatatccttaactgctatcatttcaactttcttttcgcctgctatcttagcagcattctttaaatctaattcttctgctactggtataacaaaaacatataactctttacttgttccttgagccactagtg

SEQ ID NO: 31717 - DNA, 260 bp, Unknown
  Description of Unknown: RightRegion for integrase B5718 sequence
ggtttgatctctacgatcaaggccaccagcgaccgtgttcagatagagtggaaaatctgacatttccgctctatcgcccctcatttctattttatcttgtttgtaccccttgtacaccgatgttttcatatcgtttgcagaaaataatagaaataacgaatatagattttaataatccagcagaagtgcttagtgttcgaattggattgatagcaattcgagttcttgaagtaatgtagaatttttaagaatcttttgga

SEQ ID NO: 31718 - DNA, 260 bp, Unknown
  Description of Unknown: RightRegion for integrase B5719 sequence
gtctatgacagtgaaaagaaagaattaagcatttatctctactgctccgacaccctctaaaccagcataaaataagactttagacgtactacatacgcaaatgggaaaaggttgactcagtggggttcgaaatacttagccgaccaggggtattccaccattgaaattctgcgctattattacggcagcagtatgtatatcaacacggcggatgaaatcagtggtgtgcctgcttcctggccgggcagcaaccttgaggt

SEQ ID NO: 31719 - DNA, 260 bp, Unknown
  Description of Unknown: RightRegion for integrase B5720 sequence
ctctctgaggatgggctttccgttagctttaatataaaaaaaggtggtcacaaaccttgatttttcaaggattctgaccgcctttctttttgttgtgggtgtatccacatcccactgaatggtataatacccattctgctccgctgtttcaatcacatggttatcatactccccaaagggcgggcgaaacagttccatctccactcccgtaagcttcttcacattttcatgacacttctgcaattcctgtgcaatttcct

SEQ ID NO: 31720 - DNA, 260 bp, Unknown
  Description of Unknown: RightRegion for integrase B5721 sequence
gtctatgacagtgagaagaaagaattaaacatttatctctactgctcagacaccctctaaacccgcataaactaaggctttagacgtactacatacgcaaatgggaaaaggatgactcagtggggttcgaaatacttagccgaccagggatattccaccattgagattctgcgctattattacggcagcagtatgtatatcaacacggcggatgaaatcagtggtgtacctgcttcctggccgggcagcaaccttgagat

SEQ ID NO: 31721 - DNA, 260 bp, Unknown
  Description of Unknown: RightRegion for integrase B5722 sequence
atatttaaaaagattgtttatgaccctgaaacaaatgatttagatgttacctttatgtgacatctttttgtctaaataaactgcggtgaacatccaccacgaatatatccagtatatttcattatatccttaactgctatcatttcaactttcttttctccagctatcttagcagcattttttaaatctaattcttctgcaactggtataacaaaaacatataactctttgcttgttccttgagctactaaggttttaaa

SEQ ID NO: 31722 - DNA, 260 bp, Unknown
  Description of Unknown: RightRegion for integrase B5723 sequence
agcttggtggaaagtatttacgcttcacaagataaaatcaaaataaactggaaaatttaactcgcaaatccattcgcctttgtttgtaatggttcgccgaagcgctggaagtgcacgatctcgcgcgcccgcaggaacttgatgacgtcgttgacgtcgggatcgtcggaaaggcgcaggatgttatcgtaggtcacgcgcgccttctgctcggcggcgaggtcctcggtgaggtcggcgatggtatcgcccgtgacctg

SEQ ID NO: 31723 - DNA, 260 bp, Unknown
  Description of Unknown: RightRegion for integrase B5724 sequence
acgaacggcgaagtattcattaacttcagggaaacgggaattaagacatttaaggagtaaagatgacgatatgcagaaaaatcaatatatcggtcggcgcgaaggggcggaatcgaatcctgactggagaagccgaaggactgcttgaattcaagtcaaagcccgacagggcggcggaaacgctttcttttgccattctattcgagtcgtggctcgaaagcggcgttgcatcggattattccgacatcgccaaaattacg

SEQ ID NO: 31724 - DNA, 260 bp, Unknown
  Description of Unknown: RightRegion for integrase B5725 sequence
cccaagtcggataggtatcaccaaaacctcgcagagatcgatattgagcttgtattttaaagcgatgaagttatgtatatcattgaggagctaattcttctgttcctacatctgtcaatatagcctgaacttctctgcacggcgctgcataacgctgattaagataccttaatgaagctcccaattcgccgtccgggccgccaagctgactgataattacctttgcaagcgcaggattagggttcttgatgttaaccgga

SEQ ID NO: 31725 - DNA, 96 bp, Unknown; identical to SEQ ID NO: 31695
  Description of Unknown: RightRegion for integrase B5726 sequence

SEQ ID NO: 31726 - DNA, 260 bp, Unknown
  Description of Unknown: RightRegion for integrase B5727 sequence
atatttaaaaagattgtttatgaccctgaaacaaatgatttagatgttacctttatgtgacatctttttgtctaaataaactgtggtgaacatccaccacgaatatatccagtatatttcattatatccttaactgctatcatttcaactttcttttcgcctgctatcttagcagcattctttaaatctaattcttctgctactggtataacaaaaacatataactctttgcttgttccttgagccactaatgttttaaa

SEQ ID NO: 31727 - DNA, 109 bp, Unknown; identical to SEQ ID NO: 31681
  Description of Unknown: RightRegion for integrase B5728 sequence

SEQ ID NO: 31728 - DNA, 260 bp, Unknown
  Description of Unknown: RightRegion for integrase B5729 sequence
tattataaagaaaaaaagagatttgcacagtttactttggaggttaaatttaaaatatagacttacaggtatcaacatacggattattgtttgtctgtcccatgatacatgtagaattaccccataaaaacatctttattacattatacaataaaaggctaaggaaaataacttccctagccttattttacactataaataacatagcacataatacaccaataccaaagtatgctatacgccctgccacttctaagata

SEQ ID NO: 31729 - DNA, 260 bp, Unknown
  Description of Unknown: RightRegion for integrase B5730 sequence
agagagaaacggtatagcttcggctatgccgtttttctcattcttgccttgatgaagtaactttcgatacttccagggctccaatgcccttatagtagatgtcaatttcctgggtgcggttcttgccctttggatcgctggcggcatggacaacgatcttctcgacaaactcatgtaagatacatggggttaattcaggaatttccgtataccgttctacaacggagagaaacctttccacattggcgcttttttgttcc

SEQ ID NO: 31730 - DNA, 260 bp, Unknown
  Description of Unknown: RightRegion for integrase B5731 sequence
actcgaaccccgaaggtcatcgtgctgcgggactatgtcgtcctcagaattgccgtataaagcgagagagccccggcgggtgccggggctctcttagtctatcatgtatttgctggctgttgtgaccgcgcagcaggctcccaggaatacgagagccgccacgctgatcagggcgatcatgccacgcccaggatcttcttggtcctgttcagaacgtcagcaggatccaggccggagcccttcaccttgccggcgatctc

SEQ ID NO: 31731 - DNA, 260 bp, Unknown
  Description of Unknown: RightRegion for integrase B5732 sequence
tcgttcgcctgctgcaaggaatggggagccaaaacaaaaacatacaaaccgtttcgataatatgcggctgtatggtaatcaaaaagcgtcgggaataacttctcggcgcttttacttttccctaagattacaaggaaaaggtatctgctgaattatccgagcaggaagcggacaggcaggagcttattgagcttagagatcttgtgtataagctgcaaaacagcagcggtgctgaacctgagatagaaaatgccgataaa

SEQ ID NO: 31732 - DNA, 260 bp, Unknown
  Description of Unknown: RightRegion for integrase B5733 sequence
actcgaaccccgaagatcatcgtgctgcgggactatgtcgtcctcagaattgccgtataaagcaaaggagccccggcgggtgccggggctctcttagtctatcatgtatttgctggctgttgtgaccgcgcagcaggctcccaggaatacgagagccgccacgctgatcagggcgatcatgccacgcccaggatcttcttggtcctgttcagaacgtcagcaggatccagtccggagcccttcaccttgccggcgatctc

SEQ ID NO: 31733 - DNA, 260 bp, Unknown
  Description of Unknown: RightRegion for integrase B5734 sequence
ggtttgatctctacgatcaaggccaccagcgaccgtgttcagatagagtggaaaatctgacatttccgctctatcgcccctcatttctattttatcttgtttgtaccccttgtacaccgatgtttgtaacagaccagtataaagatagcggatacactgaatcttcattgtttactagcaaaacaggatattattctcaagagtatcttgtctggacacaagaagggcaaaagtttatttatcaaatgttaaaagataag

SEQ ID NO: 31734 - DNA, 109 bp, Unknown
  Description of Unknown: RightRegion for integrase B5735 sequence
gtctatgacagtgaaaagaaagaattaagcatctatctctactgctccgacaccctctaaacccgcataaaataaggctttagacgtactacatacgcaaatgggaaaa

SEQ ID NO: 31735 - DNA, 260 bp, Unknown
  Description of Unknown: RightRegion for integrase B5736 sequence
gaagaaagcgattttgtttcggattccatcgcaaatgctccaccagcaaaaaacccttgagccataaaggcttgagggttttttcttgttcttcggccacttcgtgccgcctgtccttcaagcggcgctgctccccaaaaacctgcccgcgaagtctggatacccagagtccacagcctgaagcctggaacgccgggccgtgtccctggcttgcttgaccgccctctcaaccatcggggttctgcgcgcttttgcgcaca

SEQ ID NO: 31736 - DNA, 260 bp, Unknown
  Description of Unknown: RightRegion for integrase B5737 sequence
actaaacttaatagatccaaagagcatgttattaaagtttttcctaaacttcgtaaataagtctatatggcttatttacttagttccacctaattacatacaacatattaattatatttcatttccttccttatccactcctataggatcttgaagaaagacttctccctttgtctttttgctgttcctaaagaacataagtatttcattatctatacacttagccgcatatgttgcaagtcgtattcccttgctagtat

SEQ ID NO: 31737 - DNA, 109 bp, Unknown; identical to SEQ ID NO: 31681
  Description of Unknown: RightRegion for integrase B5738 sequence

SEQ ID NO: 31738 - DNA, 260 bp, Unknown
  Description of Unknown: RightRegion for integrase B5739 sequence
actcgaaccccgaagatcatcgtgctgcgggactatgtcgtcctcagaattgccgtataaagcaaaagaaccccggcgggtgccggggttcttttgctttatcatgtatttgctggcagcgccatcatgccacgcccaggatcttctcgaccctgttcagaacgtcagcaggatccaggccggagcccttcaccttgccggcgatctcctgcgccagcacgtcagcaggatccggctcggccggcttcgctgcgacgccc

SEQ ID NO: 31739 - DNA, 260 bp, Unknown
  Description of Unknown: RightRegion for integrase B5740 sequence
ctctctgaggatgggctttccgttagctttaatataaaaaacggcggtcacaaaccttgatttttcaaggattctgaccgcctttctttttgttgtgggtgtatccacatcccactgaatggtataatacccattctgctccgctgtttcaatcacatggttatcatattccccaaagggcgggcgaaacagttccatctccactcccgtaagcttcttcacgttttcatgacacttctgcaattcctgcgcgatttcct

SEQ ID NO: 31740 - DNA, 260 bp, Unknown
  Description of Unknown: RightRegion for integrase B5741 sequence
atcaaagaggttcgcatatttacagacgaaatccgcatcttttggaaatacgacttataagaccatcgaaaaatcatatttttatgagttataactgataaaatatgggcagattttacccaaagtctgccaaaccagaaccacggttgataccatcgactcagattggcagacctgacacgtcatcgcttactatgttaatgcttatttagtgtgcataaaccttagcatattgagtaaaaaatagggaacttaccagc

SEQ ID NO: 31741 - DNA, 260 bp, Unknown
  Description of Unknown: RightRegion for integrase B5742 sequence
agcctcatttctcaaatccgcgccacgggtgaatgtgtcgccattgagtggaaaatctgactttcaactattcaccgcacttgactatgggctgtatgcccttgtcaagtgatgttatcataatataataccagattataaaatgcagcaggagaatgaattagagcaagttgctccagaacaaaaagcacccgactttcacagagaagcagacaaaaataatagaacagtgatggtgttgcgctggatacagagatgtg

SEQ ID NO: 31742 - DNA, 260 bp, Unknown
  Description of Unknown: RightRegion for integrase B5743 sequence
ataaaagaggttcgcatatttacagacgaaatccgcatcttttggaaatacgacttataagaccatcgaaaaaccatatttttatgagttataactgataaaatatgggccaactttactctaagtctgccaaaccagaaccacggttgataccatcgactggaaggaagaacgcagcgcccagaccatattggataccgtcctccccaagcttcaccccggctgcgtaatactctgccataacaacggatataagataa

SEQ ID NO: 31743 - DNA, 260 bp, Unknown
  Description of Unknown: RightRegion for integrase B5744 sequence
ataaaagaggttcgcatatttacagacgaaatccgcatcttttggaaatacgacttataagaccatcgaaaaaccatatttttatgagttataactgataaaaatatgggccaattttactctaagtctgccaaaccagaaccacggtcgataccatcgactcagattggcagacctgacacgtcatcgcttactatgttaatgcttatttagtgtgcataaaccttagcatattgagtaaaaaatagggaacttaccag

SEQ ID NO: 31744 - DNA, 260 bp, Unknown
  Description of Unknown: RightRegion for integrase B5745 sequence
gccgtggacaatgctccaccaaaaaaaagagcgcagctatgctattttgttgcaaaatagcatagctgcgattctttttttgtacaattcactgctcaactgattgcgtatcgactcccggcgttttttgtattgctgcataaatgtcatgtactcggggctacatcaatataacggtcgttgctttctttggtggctgtgtgctgatagccgaagtccctaaaaaccaaaaggctcttgttgacatgaacggtacatta

SEQ ID NO: 31745 - DNA, 260 bp, Unknown
  Description of Unknown: RightRegion for integrase B5746 sequence
gattctgcgcttacacctccaccatccagccggaacgaatcgttccggcttttcttttaggctgacttcacgcttccgatttttctgaccggatgtctttctgcacagtggtaaaatataaacggttcacatcgcaattgggaggaaacctcatgaacacatccgcgctttcaaagcggcgaatcaccgctgcccatgcgttttttctcggtactctactggcattttttgccttagcacccgctatcttcccctatggc

SEQ ID NO: 31746 - DNA, 260 bp, Unknown
  Description of Unknown: RightRegion for integrase B5747 sequence
atcaaagaggttcgcatatttacagacgaaatccgcatcttttggaaatacgacttataagaccatcgaaaaaccatatttttatgagttataactgataaaatatgggcagattttacccaaagtctgccaaaccagaaccacggttgataccatcgactggaaggaggagcgcagcgcccagaccatattggataccgtcatacccaagcttcaccccggctgcgtaatactctgccataacaacggatataagataa

SEQ ID NO: 31747 - DNA, 260 bp, Unknown; identical to SEQ ID NO: 31323
  Description of Unknown: RightRegion for integrase B5748 sequence

SEQ ID NO: 31748 - DNA, 260 bp, Unknown
  Description of Unknown: RightRegion for integrase B5749 sequence
ggcctgatctcacagatccgcgcaaccgacgaacacgtttcgattgagtggaaaatttgacttttacttatccatcgcacacaacaaagggctgtgtgcccttgtcaagcgatgtaaaagtatactaagaattccaaacaaatatctctatacccctgatatgcagatggcttatcatgcccaaagtaatctcccttgataacattgggaaaataaaatcttccgatttctgtcagtgcagatagtctggaaagcatttc

SEQ ID NO: 31749 - DNA, 260 bp, Unknown
  Description of Unknown: RightRegion for integrase B5750 sequence
ataaaagaggttcgcatatttacagacgaaatccgcatcttttggaaatacgacttataagaccatcgaaaaaccatatttttatgagttataactgataaaatatgggccaactttactctaagtctgccaaaccagaaccacggttgacactatcgactggaaggaagaacgcagcgcacagaccatactggataccgtcctccccaagcttcaccccggctgcgtaatactctgccacaacaacggatataagataa

SEQ ID NO: 31750 - DNA, 260 bp, Unknown
  Description of Unknown: RightRegion for integrase B5751 sequence
atcaaagaggttcgcatatttacagacgaaatccgcatcttttggaaatacgacttataagaccatcgaaaaaccatattttgatgagttataactgataaaatatgggccaattttgctctaagtctgccaaaccagaaccacggtggataccatcgactcagattggcagacctgacacgtcatcgcttactatgttaatgcttatttagtgtgcataaaccttagcatattgagtaaaaaatagggaacttaccagc

SEQ ID NO: 31751 - DNA, 109 bp, Unknown
  Description of Unknown: RightRegion for integrase B5752 sequence
atattcaaaaaaataatatatgactataaaacagataaatttgaggtgtcttttaactaattttttgtttaatttaaaattaatgtacttccaccagtagcgtggaaga

SEQ ID NO: 31752 - DNA, 260 bp, Unknown
  Description of Unknown: RightRegion for integrase B5753 sequence
ataaaagaggttcgcatatttacagacgaaatccgcatcttttggaaatacgacttataagaccatcgaaaagccatatttttatgagttataactgataaaaatatgggccaattttactctaagtctgccaaaccagaaccacggttgataccatcgactcagattggcagacctgacacgtcatcgcttactatgttaatgcttatttagtgtgcataaaccttagcatattgagtaaaaaatagggaacttaccag

SEQ ID NO: 31753 - DNA, 260 bp, Unknown
  Description of Unknown: RightRegion for integrase B5754 sequence
cgcatagatctggatggggaaaatattgatatacattggagcttttcccctgaggcgtagttgataggtggtatatatggaaaaattgcatttcaaagtatcgtcgcctgagagctttattaaactggcctgtacgatgctttttgaaaaaaccgatgcgcataaagaatggggttccgtatggaatgaagcgtttgcgggaatccaaggtgaagaattatttttgaaattcacggaggagctttttcctgcaggctgca

SEQ ID NO: 31754 - DNA, 260 bp, Unknown
  Description of Unknown: RightRegion for integrase B5755 sequence
cgcatagatctggatggggaaaatattgatatacattggagcttttcccctgaggcgtagttgataggtggtatatatggaaaaattgcatttcaaagtatcgtcgcctgagagctttattaaactggcctgtacgatgctttttgaaaaaaccgacgcgcataaagaatggggttccgtatggaatgaagcgtttgcgggaatccaaggcgaagaattatttttgaaattcacggaggagctttttcctgcaggctgca

SEQ ID NO: 31755 - DNA, 260 bp, Unknown
  Description of Unknown: RightRegion for integrase B5756 sequence
ggcctgatttcttcaatcagcgcaaccagcgactatgtaaagatagagtggaaaatctgacaatctttccactctatcaaaccacttgtttctttataccgcttgtagccccttgtacaccgttgcttctaggcattgagaaaactctccttgctctttttgaataatcccttcaacatttttaaatctcgataggagttgccatttttctgaattagtcaatttttccgaagatgatactatgagacaatattttttta

SEQ ID NO: 31756 - DNA, 203 bp, Unknown
  Description of Unknown: RightRegion for integrase B5757 sequence
atcaaagaggttcgcatatttacagacgaaatccgcatcttttggaaatacgacttataagaccattgaaaaaccatattttgatgagttataactgataaaatatgggccaattttgctctaagtctgccaaaccagaaccacggtggataccatcgattggaaggaagaacgcagcgcccagaccatattggatacggtca

SEQ ID NO: 31757 - DNA, 260 bp, Unknown
  Description of Unknown: RightRegion for integrase B5758 sequence
tccaacgacggcgttggcttgaacgtgcacaacatcaagctcgatatttttttcaaatagacatgcatcatattacagctatctcaactgttgtaacaggatgcatgtatttggcacaaaaaagagggcgcacccgtcatggatgcgccatcttcgcttcattgcctccgcaggtagacatcgcttccgtcggaagtcccgaccgcgatgtaacgcgtggcaccgctgtatgacgtgtagcggccccacaggtagccgtc

SEQ ID NO: 31758 - DNA, 260 bp, Unknown
  Description of Unknown: RightRegion for integrase B5759 sequence
aaaggctgggcgccggcacaatttgagcttgaggttgctttaagaccttcgttcttgtaacttgcacaatgttcctctccacaactgtcatataccctgtaggcatcaatacatacggcctctttttcacatccgggttcgtaattgcagcctgcggctgaagaaaattctgtttccgccataaaagttcctccttatttcaagggctttttgaaaacctgtaccctttacctgctttcaaattggcccatagctttact

SEQ ID NO: 31759 - DNA, 260 bp, Unknown
  Description of Unknown: RightRegion for integrase B5760 sequence
agtctcatcgtgaagatcacagcgtgcaaagataggatccagatctactggaaaatttgacgcgccgacacttaccaagttgtacggttcgaatcaactaagaaattaaggtcaaaagtataaaaaatggagccatcatcgccatttttcgctataatatatccatgattagagtggggatacgaaatgtcccagatgcggaggagagctgaagaagtatgacaaagtaaagaggatcgttcggacaaaacacggaaagt

SEQ ID NO: 31760 - DNA, 260 bp, Unknown
  Description of Unknown: RightRegion for integrase B5761 sequence
tctgacagcaaaaaactactggaatacatgaacgctgagaaagagcaattggataactaactacaaccataaatgtaacaatacgtattgcatttaactaaatgttaaccacgttaatattttacgtagcatccttgacaagctaacataagacaaaatcagagcttcgtgttttaatctattgagtttcttactcattaacttcaaaaggaatcgaaatgaaattaccaattgttgatgtatttgagaacccatacgaa

SEQ ID NO: 31761 - DNA, 260 bp, Unknown
  Description of Unknown: RightRegion for integrase B5762 sequence
ggattgagcggaaaaccgaacgggtgttcggataacgcttgccaagctccaccaaaataagacggttcgcgcagcagcgcgggccgtcttattttttatacttattggagtgtggtgaagttggtggcgcacgacatttgggacagatatatacatttattgaatataaaaacgaacattttcaaataaaaaattagaagattgtaaaacatttgatttcattttcaggttctcaaattttcgtttatcgagccgataaa

SEQ ID NO: 31762 - DNA, 260 bp, Unknown
  Description of Unknown: RightRegion for integrase B5763 sequence
atcaaagaggttcgcatatttacagacgaaatccgcatcttttggaaatacgacttataagaccatcgaaaaaccatatttttatgagttataactgataaaatatgggccaactttactctaagtctgccaaaccagaaccacggttgataccatcgactcagattggcagacctgacacgtcatcgcttactatgttaatgcttatttagtgtgcataaaccttagcatattgagtaaaaaatagggaacttaccagc

SEQ ID NO: 31763 - DNA, 260 bp, Unknown
  Description of Unknown: RightRegion for integrase B5764 sequence
aacaaaggcggcacgttgtcggatttcacttacaatgcacctgctttcgctcatcaatgatattctggatatgagccgcatcgaaagcggaaagatccagctggacgagaccgaggtcaacctgtccgacgtgctgcacgacataaagaccatcgtcagcgggcagttttacgcaaagcagctggaattgtatatggacgcgatagatattaccgatgaggacgtctattgcgacaagacccggctgaatcaggttttga

SEQ ID NO: 31764 - DNA, 109 bp, Unknown
  Description of Unknown: RightRegion for integrase B5765 sequence
tgtaatgaatgtaacaagaatgataacaatgttcgtaaagtaaaaatctggtacgcctgagtggaatcgaaccaccgcacgcggctccggaggccgctgctctatccac

SEQ ID NO: 31765 - DNA, 260 bp, Unknown
  Description of Unknown: RightRegion for integrase B5766 sequence
aacaaaggcggcacgttgtcggatttcacttccaatgcaccagttccgtccagccgataaaggtcaccggcagatatgccatgaccacagccagcaccagcgcaatggccagcagaatagctgtcatacgggttttgcacacacgtttcaattccaaacgatacaggttcattttgcttcctccatttcctccgggaacagccacagatacagatcttccagccggggctgtgccgggacgctgtccggcagctgcggtg

SEQ ID NO: 31766 - DNA, 260 bp, Unknown
  Description of Unknown: RightRegion for integrase B5767 sequence
ggcctgatctcacagatccgcgcaaccgacgaacacgtttcgattgagtggaaaatttgacttttacttatccatcgcacacgacaaagggctgtgtgcccttgtcaagcgatgtaacagctgtcattgaagatcaaggagagcattgggtatacaaaaccgcgtggaaagcaatggacaacgatgaagaagcggaaaaaattatggaggcgattaaaaatgctggattatagagcagatcattactgcccggcgtatgg

SEQ ID NO: 31767 - DNA, 260 bp, Unknown
  Description of Unknown: RightRegion for integrase B5768 sequence
gatgataccatagactttgtattcaaagatgggagggagcagatatggcaacggcagtaagaacgattccggctacattaaacaagttcaattctaagccagtttcggctattcagaagagaagggtggcaggttatgcacgtgtatcaactgattttgctgagcaggcgacaagctacgaagcacagatgcagtactataaagcatatatacagagcaagcctgactggatatttgtggatatgtactcagatgagggc

SEQ ID NO: 31768 - DNA, 260 bp, Unknown
  Description of Unknown: RightRegion for integrase B5769 sequence
ttgcttgaggaggccctgggcgaagggttcgacaagcgctcttccggctccaccaaatagtgcaaatccgaactcattctttttcgtgaagcactgtgtcggatttgttttcatagtagaggacgtaggttaaactgcgtcctcttttttgggtgtctcgtaagtaagagcctgtttggaatctccaatgccagcagtggtcgggtcagtcacgataccgagaatcgtgaggactgcgaacagggcatttacgactgcca

SEQ ID NO: 31769 - DNA, 260 bp, Unknown
  Description of Unknown: RightRegion for integrase B5770 sequence
tccaacgacggcgttggcttgaacgtgcacaacatcaagctcgatatttttttcaaatagacatgcatcatattacagctatcgcgttcgccgtgctgatcgccctcgtgttcgccgaggattcgctcatgatgtactaccttgcgccgcagatcaccgacctgtcgttcacgtaccacctcagcgagcgcaacatgtgcgagaacgtggcggtcatcttctgcgcggttccggccatccgctcggccgccgacacgctg

SEQ ID NO: 31770 - DNA, 260 bp, Unknown
  Description of Unknown: RightRegion for integrase B5771 sequence
cgtatagatctggacggggaaaatattgatatacattggagcttttcacctgaggcgtagtaggtggtatatatggaaaaattgcatttcaaagtatcgtcgcctgagagctttattaaactggcctgtacgatgctttttgaaaaaaccgatgagcataaagaatggggttccgtatggaatgaagcgtttgcgggaatccaaggtgaagaattatttttgaaattcacggaggagctttttcctgcaggctgcacaat

SEQ ID NO: 31771 - DNA, 109 bp, Unknown
  Description of Unknown: RightRegion for integrase B5772 sequence
tgtaatgaatgtaacaagaatgataacaatgttcgtaaagtaaaaatttggtacgcctgagtggaatcgaaccaccgcacgcggctccggaggccgctgctctatccac

SEQ ID NO: 31772 - DNA, 260 bp, Unknown
  Description of Unknown: RightRegion for integrase B5773 sequence
aaaggttggtccccccgtcacttcattgtatccgtcgagatagagcctacatatttttgatgtatctaaattgcacagtcttcttcgcagcaggagtcaaacactcttcccgcgtcaacacatactgcctcttttgtgcccgcttgcatatgtttgttgtcaggcatagtaaatccccctattaaaatggtagtgaatgtcttcacttcacccttattttatgcgggagttgttcggctgtgacaaccgctgcccaaaaa

SEQ ID NO: 31773 - DNA, 260 bp, Unknown
  Description of Unknown: RightRegion for integrase B5774 sequence
gatcatatcgacgccaaagcggacggtgaaatcataatacacctcaagcacctcgcttgaggtgtgtttttttatcattttctatcttcctattacgaagctgtcgtggagacggtagcctcataacagtaagatagaaaatcgtaaaaaatgggctataccgatttggtatagccctaaatttatatactgaacttcagcccatcattcgccgccacgaccctcgaagtccgtccgtcatccgccagatgaccccgtag

SEQ ID NO: 31774 - DNA, 260 bp, Unknown
  Description of Unknown: RightRegion for integrase B5775 sequence
ggcctgatctcacagatccgcgcaaccgacgaacacgtttcgattgagtggaaaatttgacttttacttatccatcgcacacgacaaagggctgtgtgcccttgtcaagcgatgtaatcaaagcttgatatttctatatacatttcaatggcacatagccagtcagaagtataccggtattctatcatttcgccgggttcaccacataacctgatatgataacaggaattttcaaagcttttatttcacattaaatgaag

SEQ ID NO: 31775 - DNA, 203 bp, Unknown
  Description of Unknown: RightRegion for integrase B5776 sequence
atcaaagaggttcgcatatttacagacgaaatccgcatcttttggaaatacgacttataagaccatcgaaaaaccatatttttatgagttataactgataaaatatgggcagattttacccaaagtctgccaaaccagaaccacggttgataccatcgactcagattggcagacctgacacgtcatcgcttactatgttaatg

SEQ ID NO: 31776 - DNA, 260 bp, Unknown
  Description of Unknown: RightRegion for integrase B5777 sequence
aacgaatcggagagcagtggttcggatttgaacgcaaatgctccaccacaatttgtctgaaaaccacagttttcagacttttttattgtctattttttatataaatcgtctgaaaaagcaaaaaacaggggcctttcaacccctgtttttccggtttctttcgttaaagtgcgcgacaagagcgcctgcgcccagcagattaatggcgcggcgtagattataggcgaggaagctgagggcgatttcggcgctcaccttct

SEQ ID NO: 31777 - DNA, 100 bp, Unknown
  Description of Unknown: RightRegion for integrase B5778 sequence
tgtaatgaatgtaacaagaatgataacaatgttcgtaaagtaaaaatctggtacgcctgagtggaatcgaaccaccgcacgcggctccggaggccgctgc

SEQ ID NO: 31778 - DNA, 260 bp, Unknown
  Description of Unknown: RightRegion for integrase B5779 sequence
cacgcgccatcggatatgtcagtgcacggttcggattgtctattatatggggagccataaaaagccagtaaacattcgtgtttgctggtttttttatttattaaaaatataatttcataaagcaaatagctcacacggtcgcaaatgcaatcgtgtgagtgttaaccgaaaattttattaatattacatagttgcattgcttttccatttcctttttcaaagagagaataaaatcctctgcatattggactgccccaaaa

SEQ ID NO: 31779 - DNA, 260 bp, Unknown
  Description of Unknown: RightRegion for integrase B5780 sequence
cgtatagatctggacggggaaaatattgatatacattggagcttttcccctgagacgtagttgataggtggtatatatggaaaaattgcatttcaaagtatcgtcgcctgagagctttattaaactggcctgtacgatgctttttgaaaaaaccgacgcgcataaagaatggggttccgtatggaatgaagtgtttgcgggaatccaaggtgaagaattatttttgaaattcacggaggagctttttcctgcaggctgca

SEQ ID NO: 31780 - DNA, 260 bp, Unknown
  Description of Unknown: RightRegion for integrase B5781 sequence
agcctgatttcatcaatcagcgcaaccagcgactatgtaaaaatagagtggaaaatctgatactttttccactctatcaaaccacttgtttctttttatcgcttgtagccccttgtacaccgttgctttaattttattatttctaaaagagcagcattcaaaaccatccttatcaaataataagagagtagaactatcttgtcctactccctctgatacatctatgccagcccaataacgtctgcctattttgggaattt

SEQ ID NO: 31781 - DNA, 109 bp, Unknown
  Description of Unknown: RightRegion for integrase B5782 sequence
attgtttacgatcgggaatccgatactctgaaaattcatttctttttataccactcataatgccggaaacccacgtatttacaggctttccggctattttataggttgt

SEQ ID NO: 31782 - DNA, 260 bp, Unknown
  Description of Unknown: RightRegion for integrase B5783 sequence
ggcctgatctcacagatccgcgcaaccgacgaacacgtttcgattgagtggaaaatttgacttttacttatccatcgcacacgacaaagggctgtgtgcccttgtcaagcgatgtaaccaaagccgaaacggtttgaccctttccacgtttcgggactgcaccttgaaaaatatgcccgcaagacaatggcggtgcatcatagggcaaccggatacgttgctgtctgtatcgagccggacggcgggtgcgccacgatgct

SEQ ID NO: 31783 - DNA, 260 bp, Unknown
  Description of Unknown: RightRegion for integrase B5784 sequence
cgtatagatctggacggggaaaatattgatatacattggagcttttcccctgaggcgtagttgataggtggtatatatggaaaaattgcatttcaaagtatcgtcgcctgagagctttattaaactggcctgtaccattctttttgagcggaaagaggaactgctggaagattacggctctacttggcacgatgtgtttgacggggatgcaggagatcaacattttcagcggttcatggaagacttgtttccgaacggct

SEQ ID NO: 31784 - DNA, 260 bp, Unknown
  Description of Unknown: RightRegion for integrase B5785 sequence
aacaaaggcggcacgttgtcggatttcgcttccaatgcaccaggaacagtatccgaatagtactatcgtagtagctagccgcacaaaaatgcagtatgctgatgcacatgcttttgtaagtggtgatgccgattatgcctcgctggaaatcttaaatgagctcaagcactgctacattctggtgttggaaagggctgcaatagagaaagcgattggtgctaaaatcgagacgcaggaagaatatgaaacattgtctacgc

SEQ ID NO: 31785 - DNA, 260 bp, Unknown
  Description of Unknown: RightRegion for integrase B5786 sequence
atcaaagaggttcgcatatttacagacgaaatccgcatcttttggaaatacgacttataagaccatcgaaaaaccatatttttatgagttataactgataaaatatgggcagattttacccaaagtctgccaaaccagaaccacggttgacaccatcgactggaaggaggagcgcagcgcacagaccatattggatacggtcatacccaagcttcaccccggctgcgtgatactctgccataacaacggatataagataa

SEQ ID NO: 31786 - DNA, 260 bp, Unknown
  Description of Unknown: RightRegion for integrase B5787 sequence
actcgaaccccgaagatcatcgtgctgcgggactatgtcgtcctcagaattgccgtataaagcaaaagagccccggcgggtgccggggctctcttagtctatcatgtatttgctggctgttgtgaccgcgcagcaggctcccaggaatacgagagccgccacgctgatcagggcgatcatgccacgcccaggatcttcttggtcctgttcagaacgtcagcaggatccaggccggagcccttcaccttgccggcgatctc

SEQ ID NO: 31787 - DNA, 260 bp, Unknown
  Description of Unknown: RightRegion for integrase B5788 sequence
ataaaagaggttcgcatatttacagacgaaatccgcatcttttggaaatacgacttataagaccatcgaaaaaccatatttttatgagttataactgataaaatatgggccaactttactctaagtctgccaaaccagaaccacggttgataagcttgattggaaatacaatacttttacgacttatatcaagcgaatgtgcgataagggtcttttaagctatagtcaattgggtagggacaagttttattatcctgcct

SEQ ID NO: 31788 - DNA, 260 bp, Unknown
  Description of Unknown: RightRegion for integrase B5789 sequence
tcggaagccccgccgggttcgtatttggacacgttaggggcaccagaaaaagcgcggtaggatgtgtaaaacattcgccgcgctttttgttatatgttaggctgactacattttgactacaagagcataaaaaataagcggcgggcaatccctgaaaatgagggaaagtccgccgctttaattatggattatttaacttgccggtaacttgccggtaacttgccggtaacttgccggtcagtcgtctttaccgatctgct

SEQ ID NO: 31789 - DNA, 260 bp, Unknown
  Description of Unknown: RightRegion for integrase B5790 sequence
gcaatagagtccggcgtgttcgacgctggactcatcagctccaccacaagtccaccgtagttttaatagaattacggtgggctttttctattctttttctattgtttaggcgctggttacctgctaaaatgaaaatatgcctatgcaagaattttccgagtacctgtacaccgacgaaaagcgcttggaataaattacgttaggaggaaagaaagctaatgtactatcacgcatcatctgttaagggtattacacaacta

SEQ ID NO: 31790 - DNA, 260 bp, Unknown
  Description of Unknown: RightRegion for integrase B5791 sequence
ttgcttgaggaggccctgggcgaagggttcgacaagcgctcttccggctccaccaaatagtgcaaatccgaactcattctttttcgtgaagcactgtgtcggatttgttttcatagtagaggacgtaggttaaattgcgtcctcttttttgggtgtctcgtaagtaagagcctgtttggaatctccaatgccagcagtggtcgggtcagtcacaataccgagaattgtgaggactgcgaacagagcattgacaacagcca

SEQ ID NO: 31791 - DNA, 68 bp, Unknown
  Description of Unknown: RightRegion for integrase B5792 sequence
tcgtataaccatcgtttggtgggactatctgggttcgaaccggagacctcttcgatgtgagcgaagcg

SEQ ID NO: 31792 - DNA, 109 bp, Unknown
  Description of Unknown: RightRegion for integrase B5793 sequence
aacaaaggcggcacgttgtcggatttcgcttccaatgcaccaggaccgcgatggtcataaaatatggcagggccagtacgatctgggacggtatcccaaaattctgcat

SEQ ID NO: 31793 - DNA, 260 bp, Unknown
  Description of Unknown: RightRegion for integrase B5794 sequence
accctgattttcgcctctggaggcttcgccatccagtgcaagagaaatggcaaaatttagctggtaaatcctggtgtaaacaatgtaaacgaaaaatagcgtttttaagacttttctctatatatgtacgtatatgtgcgttatatatgtgtgtatatgtatatttcaatggttttaaaggaattattgtttacattgtttacaagtacctctaagccttgcaacgactgcttagaggtgtaaacgaatttcgtttacat

SEQ ID NO: 31794 - DNA, 109 bp, Unknown
  Description of Unknown: RightRegion for integrase B5795 sequence
ccgaaaggcggtacgttgtcggatttagcactcaatccacctggatcatcatgcggatgatcgtgcggtcggtctcgcgcatgccctcgctcgcaagtgtgccgatgtt

SEQ ID NO: 31795 - DNA, 260 bp, Unknown
  Description of Unknown: RightRegion for integrase B5796 sequence
tcgaaaattcgatttgaattgattggcggaattggctttgtggaacagattatgaggtaagaaaatggtgaaaaatcgaaatataccatttggatattgcatggtgaacggaaaatatgcgttgaacgctcccgaagcagaaacagtacaggaaatatttaaaaaatacataggcggcaagtcgctaaaaacaatagcggcagaaatgaggataccgtataatacgggcaaggcggtttggaataagaacatggtctgcc

SEQ ID NO: 31796 - DNA, 260 bp, Unknown
  Description of Unknown: RightRegion for integrase B5797 sequence
ggcctgatttcttcaatcagcgcaaccagcgactatgtaaagatagagtggaaaatctgacactctttccactctatcaaaccacttgtttctttatactgcttgtagccccttgtacaccgttgcttgcactgcagaaaaaaaccgagtatactcgtattattataggaagtttatctggacaggaagtacatatcatggcagaacgtcgcaagcccacacaccagaaaaagaagcgaagagcgaaacggaaggagagt

SEQ ID NO: 31797 - DNA, 260 bp, Unknown
  Description of Unknown: RightRegion for integrase B5798 sequence
gaaaagactgagtcgggggcggcgatagagccaactctcagaatcagtctcaaaatataagcctctccgccatcatgaagggatgcatttatacaccccttcatgattacagaaacacaagatgtagtagcatcgcggctggcatatacaacatatagggggaaaccgctcggttccccccttttttcgctcaaaatgcccctacacacactagggccagtcatttacaacgcctcaaaacgccttacaataagccatct

SEQ ID NO: 31798 - DNA, 260 bp, Unknown
  Description of Unknown: RightRegion for integrase B5799 sequence
gaaaagactgagtcgggcgcggcgatagaacctacgctccgaatcagtctcaaaatatagcctttcaaccatcatgaggggacgcatttatatacccctccatgattccagaaacacaagatgtcggggcgctttggcagacatatacaacatatagggggaagccgcttggtttcccccttttttcgcttgaaatacccctacacccactagggcctgccatttctaacgccttaaaacgcctctcagcaagccgttta

SEQ ID NO: 31799 - DNA, 81 bp, Unknown
  Description of Unknown: RightRegion for integrase B5800 sequence
ctacagaatcctgtcaagataaagagtggttctataatttattttggggcgctaaagtgaccgtccagatgcgtgtcctct

SEQ ID NO: 31800 - DNA, 260 bp, Unknown
  Description of Unknown: RightRegion for integrase B5801 sequence
tcagcggattgtgctccctctgcgctggggagccacactggacaaaggcgaaccacttaaaaagttcgcctttgtttattttttatcccggaaaacccgtatttggaatcatacttaatcgtgattgatattattgcccatagcttaaaaaagctatgggctttttttattttcggcattcaaggcactatttcggcattcagggcattagtcttgaaatatcctgacgtttattgtaatataaacgtacaaacattctg

SEQ ID NO: 31801 - DNA, 260 bp, Unknown
  Description of Unknown: RightRegion for integrase B5802 sequence
gaaaagactgagtcgggcgcggcgatagaacccacgcttcgaatcagtctcaaaatataatctttccaccatcatgaggggacgcatttatgcacccctccatgattccagaaacataattaaggcggatagctcaagtgctacccgcctttttgctatgcggtgcgtttccacatgtaaactgccagatacggcggcatgttgttgtgcgccttgtttccgccagtgtaaagcgtgttgacgttgccgctgtagccctt

SEQ ID NO: 31802 - DNA, 260 bp, Unknown
  Description of Unknown: RightRegion for integrase B5803 sequence
ctaaacaaaggcggcacgttgtcggatttcgcttccaatgcacctgggtcgcgctgctgattttgcgcagggaagcaatcaacccaaacggcagaaaatccttctgtgccttcttttgcgcctgtataatcagttccagcaccgcttctccgtcgggtcgccggtattccacctggtcaaactgctggtcggtcggctgtaaagcaggctgtagcatacagcctcccagtgtggtcaacagcatcgacaggctcagcagc

SEQ ID NO: 31803 - DNA, 260 bp, Unknown
  Description of Unknown: RightRegion for integrase B5804 sequence
gactcacctcgaccaaataataaaagacatccattagggtgtcttttattttttatataattttaacaggactcgaacttgcggcggaattatccaaatttggcgagtcttgtaaatgctttgaaacaagaattgcatttgacagataaattttaaactaaaacaaaaacgccctcggctgagtaaccaagggcgttttgattgagatacgtagtttttggcatcggactacgtaacattataatatcatttatattatg

SEQ ID NO: 31804 - DNA, 109 bp, Unknown
  Description of Unknown: RightRegion for integrase B5805 sequence
gaaaagattgtttataaaaaagaggaagaaacggttgatatttactattactacctctgaaaaacccttattttatgcgggtttcacgtacttgtatgttgttgctatt

SEQ ID NO: 31805 - DNA, 104 bp, Unknown
  Description of Unknown: RightRegion for integrase B5806 sequence
tccatcgacctgtccgaactttctgcttgtgttcgaacacggtcgcgtaaagtggactagacgggagtcgaacccgtgtccaaaaaccaattccctgtccttct

SEQ ID NO: 31806 - DNA, 260 bp, Unknown
  Description of Unknown: RightRegion for integrase B5807 sequence
aaaaagactgaatcaggtgcagcaatagaaccggaacttgaaatcagtctaaaaatataattcttcaggcatcatgcagggatgcatttatgcgcccctccatgattccagagacataattaaggcggatagctcaagtgctacccgcctttttgctatgcagtgcgtttccacatgtagactgccaagtatggtggcatgttgttgtgggccttgccgccgcccgcgtacatcgtttggacgttgccgccgaatcccct

SEQ ID NO: 31807 - DNA, 260 bp, Unknown
  Description of Unknown: RightRegion for integrase B5808 sequence
gaattatataatacaaattttatatttgcaccagaacctaaaaaagtatgggataagtaataaatttatagtgagggtatgtcatagacaagacctggagttcacgcttcacatggtatggagagaactcactatgatgctttagaaaacaccataaaactaatatatttatatttaacaaggtaaaataagaaaaataattaacaaatttgagtcatctaaaagtgaaaaatacttttaggtgactttttttagattat

SEQ ID NO: 31808 - DNA, 260 bp, Unknown
  Description of Unknown: RightRegion for integrase B5809 sequence
gatttgagcggtcaagctccaccacaagtcaaaaaatccgaacattatcatcaatggtgatacgttcggatttttgatttttatgagttgttttataatttagaaattactgtggtttgtagcatattctcggcctcctccaagccttgcatcacttccgccatgatgcgagtggccaagataaatcctgaactgaacgcttcacactcagtgatgcaggacagttcacttgtgcagtccttgaatttttcaaaggtttc

SEQ ID NO: 31809 - DNA, 260 bp, Unknown
  Description of Unknown: RightRegion for integrase B5810 sequence
ctgtcgaaagacggtaggttatcggattacgcttccaatactccagattggaaatcctaaaatgatctcatcataagcttctacgtttgcatctttatctgcgatggctggacgaattgtcttatcactcatttctacactgcttcgtgattttttatccatccagtttaaatctgcggttgtatatggaatttcaggtttgatctcgtagatgtcagctcctgctgcctctgcgatcttattggctactttttctgtga

SEQ ID NO: 31810 - DNA, 260 bp, Unknown
  Description of Unknown: RightRegion for integrase B5811 sequence
ggaaaaagaaacggtaaaggagtgtataattttaagttgaatatttatttaaagatatagcgtttttttctatatctttttatttctatcatttacgagctaacgaacttgcacacgttgaaattatcagtactctattctatcaacttaccaatggtctaacacctcaagaaattaaagatggtggattagatgcctactttacagatcatactctaggagtttatccaacaaatagtgctggtataccatttagtgca

SEQ ID NO: 31811 - DNA, 260 bp, Unknown
  Description of Unknown: RightRegion for integrase B5812 sequence
ataatttcaagacgatggtctacaaagcgcaagataatggttgagataagggtggaatagcgcaaaacaccctgaaaaagacaaaaaaataataacctaacttggaaattcaagttaggttatttgtggtgaccctaccgaggttcgaactcgggttaccgccgtgaaagggcgatgtcttagaccacttgaccatagggccgtatttcgatttatttgagttcagatggtggaagctacaggactcgaacctgtgaccc

SEQ ID NO: 31812 - DNA, 109 bp, Unknown
  Description of Unknown: RightRegion for integrase B5813 sequence
ctgtcgaaagacggtaggttatcggattacgcttccaatactccagattggaaatcctaaaatgatctcatcataagcttctacgtttgcatctttatctgcgatggct

SEQ ID NO: 31813 - DNA, 260 bp, Unknown
  Description of Unknown: RightRegion for integrase B5814 sequence
tcaaacatcgagggcggcgagttcgacgagggactcgtcaggtccaccaaaacaatataatccgaaccttttgccgattggtcatgggttcggatttgttgtttctgttgaggaaattgaagactggtagctttgtctcgattcttgacacaatgctcaaggtgtacttagcataagacgatatgtgctgcccttactgacctcatggaaacagaaaaagtcgcccggatccattgcgctgcaatggatccgggcggttc

SEQ ID NO: 31814 - DNA, 260 bp, Unknown
  Description of Unknown: RightRegion for integrase B5815 sequence
gatttgagcggtcaagctccaccacaagtcaaaaaatccgaacattatcatcaatggtgatacgttcggatttttgatttttatgagttgttttataatttagaaattactgtggtttgtagcatattctcggcctcctccaagccttgcatcacttccgccatgatgcgagtggccaagataaatcctgaactgaacgcttcacactcagtgatgcagggcagttcacttgtgcagtccttgaatttttcaaaggtttc

SEQ ID NO: 31815 - DNA, 260 bp, Unknown
  Description of Unknown: RightRegion for integrase B5816 sequence
gaaaagactgagtcgggagccgcgattgaaccaacgctccgaatcagtctcaaaatataagtctctccaccatcatgaaggcatgcatttatgcacccctccatgattccagaaacacaagatgttgagggcgcatcaataggtatacacaacatatggggggaaaccgcttggtttcccccttttttgcgctaaatgcccctacacccactagggcctgccatttctaacgccttagaacgccccacagcaagccgtct

SEQ ID NO: 31816 - DNA, 260 bp, Unknown
  Description of Unknown: RightRegion for integrase B5817 sequence
gctggtgatccatcatattcaatatgtacctttttctttcctgcgaaaagtaaaacataaaataaaaatccctccccaccgaaaacggaaaggagggcggagttatataataatttatagttggcgttcgctatttggggcaagtatcgtggaaagctatataggtgaccggtatttaattcctctcatcttctgttcgccgtttagggtatcgcatttcgttacgacccttgccgatggggtaagtttgacttacgtca

SEQ ID NO: 31817 - DNA, 260 bp, Unknown
  Description of Unknown: RightRegion for integrase B5818 sequence
gaaaagactgagtcgggcgcggcgatagaaccaacgctccgaatcagtctcaaaatatagcctttccatcatcatgaagggatgtatttatgcatcccaacatgattccagaaacacaatatgtagcagcatcgctgctggcatatacaacatatagggggaaacttgcgggtttccccctttttcggcgtgaaaatcagggtatagttacacatcctgacacaaaatggggccttagaacgcattacaacaagccgctg

SEQ ID NO: 31818 - DNA, 260 bp, Unknown
  Description of Unknown: RightRegion for integrase B5819 sequence
gaaaagactgagtcgggcgcggcgatagagcccacgcttcgaatcagtctcaaaatataatctttccaccatcatgaggggacgcatttatgcacccctccatgattccagagacataattaaggcggatagctcaagtgctacccgcctttttgctatgcggtgcgtttccacatgtagactgccaagtatggcggcatgttgttgtgagccttgcttccgcccgcgtacatagtctgcacgttgccgccgaatcccct

SEQ ID NO: 31819 - DNA, 260 bp, Unknown
  Description of Unknown: RightRegion for integrase B5820 sequence
aatttcagccgaaaaacaaaagatcggctaaccgttttttcaggaactgtagggatttgaaccaatacgctttctgaaaaagcaaggtgccctttttgaaataaaaaaacaaaagggcaccttttttctgtactaaaaaattcatagtaggaaagaggcacctgtccgctggttttggataccagcagataggtgctttttttcattttcagaattcaaaaagggcgctggaatatcgcaaagagttccggcgccctttt

SEQ ID NO: 31820 - DNA, 109 bp, Unknown
  Description of Unknown: RightRegion for integrase B5821 sequence
tccaaagccctttacgactccaaaacaaaaaccctcaccgtctattattacgcccaataatcattacgaataacaatacggcggtcccgacggcgaattaggtgcgtcg

SEQ ID NO: 31821 - DNA, 260 bp, Unknown
  Description of Unknown: RightRegion for integrase B5822 sequence
atcatcgtggacgacaaaaagcaggtgaaaatcaatctaaaaataacgggcaatttgtaaagaggagctgctttgcatacctacttggtgtagaccgtagaggtcgtcgacccgatgctgctgtgcgcgcactttgccgacaactgcaactgccgctgcggctgcgatcgcggctcgctcggcggtgtgcccgcgggcattctggcagcattcgacgagccaatcatcttcgacgagtccgcgattcgccgcgtgtgcat

SEQ ID NO: 31822 - DNA, 260 bp, Unknown
  Description of Unknown: RightRegion for integrase B5823 sequence
gctggtgatccatcatattcaatatgtacctttttctttcctgcgaaaagtaaaacataaaataaaaatcccttcccaccgaaaacggaaaggagggcggagttatataataatttatagttggcgttcgctatttggggcaagtatcgtggaaagctatataggtgaccggtatttaattcctctcatcttctgttcgccgtttagggtatcgcatttcgttacgacccttgccgatggggtaagtttgacttacgtca

SEQ ID NO: 31823 - DNA, 260 bp, Unknown
  Description of Unknown: RightRegion for integrase B5824 sequence
atcatcgtggacgacaaaaagaaggtgaaaatcaatctaaaaataacgggcaatttgtaaagaggagctgctttgcatacctacttggtgtagaccatagatgtaattgacaccaaatgtgcgtgttggctgtgttattttgcagcgtgtgcgtggggcgtggactcctatttggtgtcgatgacaactgacaatgatactaaataggcatccagccaaattctgcaatttcaatctctgacataagtcaataatccccc

SEQ ID NO: 31824 - DNA, 260 bp, Unknown
  Description of Unknown: RightRegion for integrase B5825 sequence
acacgggagattcatccgaggaatattgaaaaattcaaaaagaagctcatcctatactaattattatgttatcatttaagcgcatacaaataaaaaaaagggccgccaaatggcgacctgtcgcttacttcgaagcaacgtagtattaggataggagtggagagaaaccatactgtacccttattatatgtatacgttttcattttgtcaacactttcagtaaaattgtttgaattaattatatctttcggtaaataagg

SEQ ID NO: 31825 - DNA, 260 bp, Unknown
  Description of Unknown: RightRegion for integrase B5826 sequence
aagccgcaaaagacccgccccatggcgttcacgctggagatcaagctgaaaaatatctaaggttgtcaatcccatgaataggattgacaaccttagaggtaaattaaaaacggcaaaagaacaatctacattgaggcaatatggatcagtcgcactcgataatcttcagcatagtctgatgcggcttcttgctgttgtccaacgcataaaaatacgggaaatcatttccacataagacctcgttaattgcgtagtcccag

SEQ ID NO: 31826 - DNA, 109 bp, Unknown
  Description of Unknown: RightRegion for integrase B5827 sequence
gaaaagattgtctataaaaaagaagaagaaatggtggaaatttactactactacgtctgaaaaatccttattttatgcgggtttcagtcgtttgtatgttgttgctatt

SEQ ID NO: 31827 - DNA, 76 bp, Unknown
  Description of Unknown: RightRegion for integrase B5828 sequence
gaatgttcgcactcatgcgatatggtggaccaccaggggttcgaaccctggacaccctgattaagagtcaggtgct

SEQ ID NO: 31828 - DNA, 260 bp, Unknown
  Description of Unknown: RightRegion for integrase B5829 sequence
atcatcgtggacgacaaaaagcaggtgaaaatcaatctaaaaataacgggcaatttgtaaagaggagctgctttgcatacctacttggtgtagaccgtagatgtaattgacaccaaatgtgcgtgttggctgtgttattttgcagcgtgtgcgtggggcgtggactcctatttggtgtcgatgacaacggctgtcgacccactgctgctgtgcgcgcgcattgtcgactgctcctgcgggaactgctgcgactgcgcagc

SEQ ID NO: 31829 - DNA, 180 bp, Unknown
  Description of Unknown: RightRegion for integrase B5830 sequence
tcaaacattgagggcggcgagttcgacgagggactcgtcggctccaccaaattgtgttgacaaaaaagatgcacagcaaaaatgccgcacgaaagtgcggtgtttttgcgttcaaaagaaaaaacaggcgaattcagaacagaaaagttagattttcaaaaagagggtccgctcactccg

SEQ ID NO: 31830 - DNA, 260 bp, Unknown
  Description of Unknown: RightRegion for integrase B5831 sequence
tggaaagaaaagaaacgattaaaggaggctcaagagcaaaatggaaacgataatcaataatcaacccaaagtggtgagagttgtaaggaaggtatcgtccacgcagataaccgcacaaactatacgggagcagttgacagatacgcgattgcccgttgcggcctatgcaagagtctcaactacaaacgaagagcaggaagacagtcttgaaagacaaagagcgcattacaccgaatatataggaaatcgtcccgaatggc

SEQ ID NO: 31831 - DNA, 260 bp, Unknown
  Description of Unknown: RightRegion for integrase B5832 sequence
ggaaaaagaaacggtaaaggaatgtataattttaagttgaatatttatttaaagatatagagtttttttctatatctttttatttctatcatttacgagctaacgaacttgctcatgttgaaattattagtacccttttctatcaacttaccaatggtctaacacctcaagaaattaaagaaggtggattagatgcttattttactgatcatacattaggtgtctatccaacaaatagtgcgggtattccttttagtgcc

SEQ ID NO: 31832 - DNA, 260 bp, Unknown
  Description of Unknown: RightRegion for integrase B5833 sequence
ctgaaaatcaccttatcaacgcaaaatgtttgcgcttatttggtgccgcggaggcgatagcgtgggacgtatagaatggacaagtatgcatttttctcatgagctcaggcttaggtgtttggcagttgcgtgaatgcaagttgctgaatatgctgccagcgctggtcatgccgcaggttttctaggcgctgatggggctggtgaagtgagctttagagaaaagtctcctttaaagtaaaattatttttaggctcattgta

SEQ ID NO: 31833 - DNA, 260 bp, Unknown
  Description of Unknown: RightRegion for integrase B5834 sequence
gccgacggtagttcggatttggaacgtaattctccaccaaagaaacgacaattttcgtgagaagattgtcgtttctttttgttttgtatgtttatcttttcgtttttctttttttgatttgaaagataacggacacgagaaaaattatgcggaaaccggtttttgtcatcggtaatgcatcatccgattgcagcttttgccgagcaatagcaccgacgccgattgttatcgttttttctgttgtgtattagatttaaaaa

SEQ ID NO: 31834 - DNA, 260 bp, Unknown
  Description of Unknown: RightRegion for integrase B5835 sequence
tctgatatgcttaaagatatgagaaaagatgcgacttctaacacctttgctccaccatagaacgcattagcatttgctagtgcgttttttattgtacattaataattttagttgtataattatgttattacactttaagaggttttattatgaataaggaactagcttacaaattagttaaaaataatgatgaaattcattctttctatcttcttgcagacaaagtatggcacgagtactttccttgtattcttgagaaa

SEQ ID NO: 31835 - DNA, 109 bp, Unknown; identical to SEQ ID NO: 31826
  Description of Unknown: RightRegion for integrase B5836 sequence

SEQ ID NO: 31836 - DNA, 260 bp, Unknown
  Description of Unknown: RightRegion for integrase B5837 sequence
tctgatatgcttaaagatatgaaaaaaggtgcgacttctaacacttttgctccaccatagaacgcattagcatttgctagtgcgtttttttattgtacattaataattttagttgtataattatgttattacactttaagaggttttattatgaataaggaactagcttacaaattagttaaaaataatgatgaaattcattctttttatcttcttgcagacaaagtatggcatgagtactttccttgtattcttgagaa

SEQ ID NO: 31837 - DNA, 260 bp, Unknown
  Description of Unknown: RightRegion for integrase B5838 sequence
ggaaaaagaaacggtaaaggaatgtataattttaagttgaatatttatttaaagatatagcgttttttctatatctttttatttctatcatttacgagctaacgaacttgcacacgttgaaattatcagtactctattctatcaacttaccaatggtctaacacctcaagaaattaaagatggtggattagatgcctactttacagatcatactctaggagtttatccaacaaatagtgctggtataccatttagtgcag

SEQ ID NO: 31838 - DNA, 260 bp, Unknown
  Description of Unknown: RightRegion for integrase B5839 sequence
tcaaacatcgagggcggcgagttcgacgagggactcgtcagctccaccattacaatctaattcgaacatttttgtaacgcttgatgtgttcgggttagtcgttcagattgaacgataaagaaataaccccgctttcctgtaagggaaggcggggttattctcttttcctgctcatagctgcgcggatagcaagcgccgccatgcagtaatttgttattgctccgtttttttgcctgtaaagctccgacaggctcaatccg

SEQ ID NO: 31839 - DNA, 235 bp, Unknown
  Description of Unknown: RightRegion for integrase B5840 sequence
gctggtgatccatcatattcaatatgtacctttttctttcctgcgaaaagtaaaacataaaataaaaatccctccccaccgaaaacggaaaggagggctaaaattatgtgtgtttttgcatttcgctagagttagacagtggaacaccatgaaaacaaaaagataacaaaacattgaaattttgcgtataatatgatatattaacaacaataatattacaaatccagtagatttt

SEQ ID NO: 31840 - DNA, 77 bp, Unknown
  Description of Unknown: RightRegion for integrase B5841 sequence
gaatgttcgcactcatgcgatatggtggaccaccaggggttcgaaccctggacaccctgattaagagtcaggtgctc

SEQ ID NO: 31841 - DNA, 260 bp, Unknown
  Description of Unknown: RightRegion for integrase B5842 sequence
tctgatatgcttaaggatatgaaaaaaggtgcgacttctgccacctttgccccaccatagaacgcattagcatttgctagtgcgttttttcattttacattaataattttagttgtataattgtattatcacacataaagaggttttattatgaataaggaactagcttacaaattagttaaaaataatgatgaaattcattctttttatcttcttgcagacaaagtatggcatgagtactttccttgtattcttgagaa

SEQ ID NO: 31842 - DNA, 260 bp, Unknown
  Description of Unknown: RightRegion for integrase B5843 sequence
ttaaaagctctttatgattccaaaacaaaaaccctcactgtctattattacgcccaataatcattacgaataacaatacggtggtctttatggcagttggttatgatttattcctataccatttataatacagttttctttcaaaagttaattattgttacacatattgacattttttgtattttatgagattatagaaaaaaacagtgaaaggaataaatgtatgattaaaaattctacacacgctaagcaaaaaagcc

SEQ ID NO: 31843 - DNA, 260 bp, Unknown
  Description of Unknown: RightRegion for integrase B5844 sequence
ggaaaaagaaacggtaaaggagtgtataattttaagttgaatatttatttaaagatatagcgttttttctatatctttttatttctatcatttacgagctaacgaacttgcacacgttgaaattatcagtactctattctatcaacttaccaatggtctaacacctcaagaaattaaagatggtggattagatgcctactttacagatcatactctaggagtttatccaacaaatagtgctggtataccatttagtgcag

SEQ ID NO: 31844 - DNA, 260 bp, Unknown
  Description of Unknown: RightRegion for integrase B5845 sequence
acgtctgatttcgtcggcgccctcccgggttcgtatttgggcgggtcaggggtaccatgacgagtgttcttataggatttgatcctttgagaacacccgtcatttttattgtctattttgcgccggttcgtaactgacatagacacctctgcgagtgttgactgttacatcaggcacgggcatggacggggtatccgggataaacagggcgccgacacagttgtagtagatggtcaatttctggacccattcgccgttga

SEQ ID NO: 31845 - DNA, 260 bp, Unknown
  Description of Unknown: RightRegion for integrase B5846 sequence
ctgtcgaaagacggtaggttatcggattacgcttccaatactccagattggaaatcctaaaatgatctcatcataagcttctacgtttgcatctttatctgcgatggctggacgaattgtcttatcactcatttctacactgcttcgtgattttttatccatccagtttaaatctgcggttgtatatggaatttcaggtttgatctcgtagatgtcagctcctgctgcctctgcgatcttattggctactttctctgtga

SEQ ID NO: 31846 - DNA, 260 bp, Unknown
  Description of Unknown: RightRegion for integrase B5847 sequence
tctgatatgcttaaagatatgagaaaaggtgcgacttctagcactcttgctccaccatagaacgcattagcatttgctagtgcgttttttcattgtacattaataattttagttgtataattatgttattacactttaagaggttttattatgaataaggaactagcttacaaattagttaaaaataatgatgaaattcattctttttatcttcttgcagacaaagtatggcatgagtactttccttgtattcttgagaa

SEQ ID NO: 31847 - DNA, 260 bp, Unknown
  Description of Unknown: RightRegion for integrase B5848 sequence
tcaaatatcgagggcggtgagttcgacgagggactcattagctccaccaaaacaatataatccgaaccttttgccgattggtcatgggttcggatttgttgtttctgttgaggaaattgaagactggtagctttgtctcgattcttgacacaatgcttgctgaacagccgtctgctcaaggtgttcttagcataagacgatatgtgctgcccttactgacctcatggaaacagaaaaaatcgcccggatccattgcagcg

SEQ ID NO: 31848 - DNA, 260 bp, Unknown
  Description of Unknown: RightRegion for integrase B5849 sequence
ctaaacaaaggcggcacgttgtcggatttcacttccaatgcaccagattgggaaacctaaaataatctcatcatacccgctgatatcaatcgtattatctgccaattccggacgaatcttcttatcattcatctccacactactgcgtgacttcttatccatccagttcagatctgctttggtatacgcaaccttcggtgtaatctcatatatgtcacaatctgctgcctctgcaatcatctctgccactttccgtgtaa

SEQ ID NO: 31849 - DNA, 109 bp, Unknown
  Description of Unknown: RightRegion for integrase B5850 sequence
gaaaagatagtctataaaaaagaggaagaaatcgtagatatttgctactactacctctgaaaagcccttattttatgcgggtttcacatgcttgtatgttgttgttatt

SEQ ID NO: 31850 - DNA, 76 bp, Unknown
  Description of Unknown: RightRegion for integrase B5851 sequence
gatggttcgttttcagttgatgtggtggaccaccaggggttcgaaccctggacaccctgattaagagtcaggtgct

SEQ ID NO: 31851 - DNA, 260 bp, Unknown
  Description of Unknown: RightRegion for integrase B5852 sequence
atcatcgtggacgacaaaaagaaggtgaaaatcaatctaaaaataacgggcaatttgtaaagaggagctgctttgcatacctacttggtgtagaccatagatgtcatcgacaccaaataggagtccacgccccacgcacacgctgcaaaataacacagccaacacgcacatttggtgtcaattacaacggctgtcgacccgctgctgctgtgcgcgcgcattgtcgactgctcctgcgggaactgctgcgactgcgcagc

SEQ ID NO: 31852 - DNA, 260 bp, Unknown
  Description of Unknown: RightRegion for integrase B5853 sequence
aaaaacggttcggatttggattgccttgttgcaccaaaatgctctaaacgtaaggtttagagcatttttcagcctgtcaaagaacctcaccagcggcggggttcttctggtataatagagaaaagggggattgaatatggagaactggaaaaaggattcccgaaaagacattgttatggtggatgtggatggattagtcccccaagaccatctgctccgaaaagtagaaagggtcatggattatgactggctatatgagc

SEQ ID NO: 31853 - DNA, 260 bp, Unknown
  Description of Unknown: RightRegion for integrase B5854 sequence
aaaaagactgaatcaggtgcagcaatagaaccggaacttgaaatcagtctcaaaatataatctttccaccatcatgaggggatgcatttatgcacccctccatgattccagagacataattaaggcggatagctcaagtgctaccagcctttttgctatgcagtgcgtttccacatgtacacggccagatatggcggcatgttgtcgtgcgccttgttcccgccagcgtacagcgtgttgacgttgccgctgtagccctt

SEQ ID NO: 31854 - DNA, 167 bp, Unknown
  Description of Unknown: RightRegion for integrase B5855 sequence
gaaaagattgtctataaaaaagaagaagaaatggtggaaatttactactactacgtctgaaaaatccttattttatgtgggtttcagtcgtttgtatgttgttgctatttgggtgacacaatggggctcaaaatatctgggagatcaaggctattctgccattgaaa

SEQ ID NO: 31855 - DNA, 260 bp, Unknown
  Description of Unknown: RightRegion for integrase B5856 sequence
gaaaagactgagtcgggcgcagcgatagagcctacgctccgaatcagtctcaaaatataaaccgtccaccatcatgaagggacgcatttatgcacccctccatgattccagaaacacaagatgtagcagcatcacggctgtcacatacaacatataaggggaaaccgcttggtttcccccttttttgctgcgaaaaccaggctatatttacccaccgcgacgatttgaacgccttagaacgcattctgacaagcctctga

SEQ ID NO: 31856 - DNA, 260 bp, Unknown
  Description of Unknown: RightRegion for integrase B5857 sequence
tcctcagcggattgtgctccctctgcgctggggagccaagcaaattttaaggcgaactaaaatcgaggacagagagtaatgtttgttttacttcttttccttggcgttaggtcgccttaaatcgttatttagggcttttttatcgctgttacaattaagagtagtttatttcacaaggaagcagggcttccgtatgcttacgttatgtaagtgtacggaagcccttttttgttgcccgattattcttgataaggtgtgat

SEQ ID NO: 31857 - DNA, 109 bp, Unknown
  Description of Unknown: RightRegion for integrase B5858 sequence
ttgacgattgacaaagtgcttgtctccccgtcccgcccgccggaaatcatctggaaataattgtgtttatttatgcactgtgtatttttatgtctagcgtatctacatc

SEQ ID NO: 31858 - DNA, 260 bp, Unknown
  Description of Unknown: RightRegion for integrase B5859 sequence
gccgacggtagttcggatatgaaacgtaattctccaccaaagaaacgacaattttcgtgagaagattgtcgtttctttttgttttgtatgtttatcttttcgcttttctctttttgatttgaaagataacggacaagagaaaaattatgcggaaaccggtctttgtcatcgataatgcatcatccgattgcagcttttgccgagcaatagcaccgacgccgattgttatcgttttttctgttgtgtattagatttaaaaa

SEQ ID NO: 31859 - DNA, 109 bp, Unknown
  Description of Unknown: RightRegion for integrase B5860 sequence
gccgacggtagttcggatatgaaacgtaattctccaccaaagaaacgacaattttcgtgagaagattgtcgtttctttttgttttgtatgtttatcttttcgcttttct

SEQ ID NO: 31860 - DNA, 260 bp, Unknown
  Description of Unknown: RightRegion for integrase B5861 sequence
gaaacgcaggaaatgactgtggttttgaatgatgatatatcgcttgtaaattgcaaatagattttggatataatataatgtcatcagacacataatatgttccattttggacaaaacaaaacccctgaaagtggaccagactttcaggggttttctattgccaattattaacatatgtactataataccgataacttaataatgaacttaatcagagagccgaagggtgctacgacagttgccggacttacaaaggaagg

SEQ ID NO: 31861 - DNA, 260 bp, Unknown
  Description of Unknown: RightRegion for integrase B5862 sequence
aaaggtgcaaaacccgctgactttaaattggacatttctttgttacctatattcctatagagtgttcattcttatgagtaagactgttcactatataaacaacactccccaccgaaaacggaaaggagggcggagttatataatgaaaaagagttcacttaacaaatttttgttaggtctagggacctaaaggctcgaaagcacaataggccccgatacactattggcaaggcggcactcttgcatctcaggtactcttt

SEQ ID NO: 31862 - DNA, 260 bp, Unknown
  Description of Unknown: RightRegion for integrase B5863 sequence
gccgacggtagttcggatatgaaacgtaattctccaccaaagaaacgacaattttcgtgagaagattgtcgttcctttttgttttgtatgtttatcttttcgtttttcttttttgatttgaaagataacggacaagagaaaaattatgcggaaaccggtctttgtcatcggtaatgcatcatccgattgcagcttttgccgagcaatagcaccgacgccgattgttatcgtttttcctattgtgtattagatttaaaaag

SEQ ID NO: 31863 - DNA, 260 bp, Unknown
  Description of Unknown: RightRegion for integrase B5864 sequence
gccgacggtagttcggatatgaaacgtaattctccaccaaagaaacgacaattttcgtgagaagattgtcgtttctttttgttttgtatgtttatcttttcgtttttctttttttgatttgaaagataacggacaagagaaaaattatgcggaaaccggtttttgtcatcggtaatgcatcatccgattgcagcttttgccgagcaatagcaccgacgccgattgttatcgttttttctattgtgtattaggtttaaaaa

SEQ ID NO: 31864 - DNA, 109 bp, Unknown
  Description of Unknown: RightRegion for integrase B5865 sequence
gccgacggtagttcggatatgaaacgtaattctccaccaaagaaacgacaattttcgtgagaagattgtcgtttctttttgttttgtatgtttatcttttcgtttttct

SEQ ID NO: 31865 - DNA, 109 bp, Unknown
  Description of Unknown: RightRegion for integrase B5866 sequence
aaaagcccgaaatccaagcccggcgactttacacttgaaattatccttaaagacatataaggttgctaatcttatgataaagactgtgttgagagtctaagattttatc

SEQ ID NO: 31866 - DNA, 260 bp, Unknown
  Description of Unknown: RightRegion for integrase B5867 sequence
aaaggagcaaaacccgctgattttcagttggaagtttctttgttacctatattcctctagagcgctcattcttatgataaggattgtcttgaggatttacgcgtatatttttcgcccgcgtcccaggctgtcatcgaccaggccgctcaggtgcgtatgcgtaatgtagacgttctcgtagtatacttagggctggagcctgtaccgttccacaagggcttttactctgtggatatgaccttcttctttgaagtgaccct

SEQ ID NO: 31867 - DNA, 260 bp, Unknown
  Description of Unknown: RightRegion for integrase B5868 sequence
gaaacgcaggaaatgaccgttgtgttaaatgatgatatttcccttgcatattgcaaatagattttggatataatacaatgtcatcagacacataatatgttccattttgaacaaaacaaaccccctgaaagtgggtcagactttcagggggtttctattgccaattattaacatatgtactataataccgataacttaaaatcttaataatgaacttaatcagagagccgaagggtgctacgacagttgccggacttaca

SEQ ID NO: 31868 - DNA, 260 bp, Unknown
  Description of Unknown: RightRegion for integrase B5869 sequence
gaaacgcaggaaatgaccgtggttttgaatgatgatatatcgcttgtaaattgcaaatagattttgcatatgatataatggcatcagacacataatatgttccattttgaacaaaacaaaacctctgaaagcggaccagactttcaggggttttctattgccaattattaacatatgtacttataataccgataacttaataatgaacttaatcagagagccgaagggtgctacgacagttgccggacttacaaaggaag

SEQ ID NO: 31869 - DNA, 260 bp, Unknown
  Description of Unknown: RightRegion for integrase B5870 sequence
cccggagcaaaaccggccggctttgagttagaaatgtatctgaagcctatgtatttataaggaaagctgttttgtacttgcactctctcaatgaaaggccatataatagaagcggaactaaaaatgtactatcataaaggaactgcgggtcgaatatatataagcagtatccataaaatgtaaataaagttatgcttgaacatttcagtttattgaggtataatagttaatatcaaagggtacatattggtctgcacaaa

SEQ ID NO: 31870 - DNA, 260 bp, Unknown
  Description of Unknown: RightRegion for integrase B5871 sequence
aaaggcgcaaaacccgctgactttaaattggaaatttctttgttacctatattcctatagagcgttcattcttatgataaggattgtcttgaggatttacgcgtatatttttcgcccgcgtcccaggctgtcatcgaccaggccgctcaggtgcgtatgcgtaatgtagacgttctcgtagtatacttagggctggagcctgtaccgttccacaagggcttttactctgtggatatgaccttcttctttgaagtgaccct

SEQ ID NO: 31871 - DNA, 260 bp, Unknown
  Description of Unknown: RightRegion for integrase B5872 sequence
gccgacggaagttcggatatgaaacgtaattctccaccaaagaaacgacaattttcgtgagaagattgtcgtttctttttgttttgtatgtttatcttttcgtttttctttttttgatttgagagataactgacaagagaaaaattatgcggaaaccggtttcccttatcggtaatgcatcatccgattgcagcttttccgagcaatagcaccgacgccgattgttatcgttttttctattgtgtattagatttaaaaag

SEQ ID NO: 31872 - DNA, 109 bp, Unknown
  Description of Unknown: RightRegion for integrase B5873 sequence
gccgacggaagttcggatatgaaacgtaattctccaccaaagaaacgacaattttcgtgagaagattgtcgtttctttttgttttgtatgtttatcttttcgcttttct

SEQ ID NO: 31873 - DNA, 260 bp, Unknown
  Description of Unknown: RightRegion for integrase B5874 sequence
gccgacggtagttcggatatgaaacgtaattctccaccaaagaaacgacaattttcgtgagaagattgtcgtttctttttgttttgtatgtttatcttttcgtttttctttttttgatttaaaagacaacggacaagagaaaaaattatgcggaaaccggttattgtcatcggtaatgcatcatccgattgcagcttttccgagcaatagcaccgacgccgattgttatcgttttttctgttgtgtattagatttaaaaa

SEQ ID NO: 31874 - DNA, 260 bp, Unknown
  Description of Unknown: RightRegion for integrase B5875 sequence
gccgacggtagttcggatatgaaacgtaattctccaccaaagaaacgacaattttcgtgagaagattgtcgtttctttttgttttgtatgtttatcttttcgtttttctttttttgatttgaaagataacggacaagagaaaaattatgcggaaaccggtttttgtcatcggtaatgcatcatccgattgcagcttttgccgagcaatagcaccgacgccgattgttatcgttttttctgttgtgtattagatttaaaaa

SEQ ID NO: 31875 - DNA, 260 bp, Unknown
  Description of Unknown: RightRegion for integrase B5876 sequence
gtgatacaaaacagagagtattacggacttaaagatttcagacttataatgcgtatttgatacatacgcagacgatttattccacggtgttcttgacgtgagcctctaaggagcgtgtcggtaggcaaataaaccgccaaccgacagccccaaggggcttttcgtttgcctttggcaagatagcctgacacactcctttctcacgtcaagaacctttcgcggcataaaaccgtctgcaactgctacggacaaagcgatac

SEQ ID NO: 31876 - DNA, 211 bp, Unknown
  Description of Unknown: RightRegion for integrase B5877 sequence
gggagaacgctctacgtcctgcccggcgggcttctgctgcgcgcgaggatggcagcctagtaacggctgccgggcgtcctcgttacgccctcatttgggacacaagtcaagcaaaaaggcccccaccgccgaagtgaactgcctcccatttcttggacatcgagaaatgggaggttttcttatgcgcgtcgatctcagggtgaagcacgat

SEQ ID NO: 31877 - DNA, 109 bp, Unknown
  Description of Unknown: RightRegion for integrase B5878 sequence
aagcctcctcccactttaaaaaataatgaaaatggcaccgaactgccggcaccattttgaaactaacttttgttagttttttttattgtgaaacaacaaggttcccggg

SEQ ID NO: 31878 - DNA, 260 bp, Unknown
  Description of Unknown: RightRegion for integrase B5879 sequence
gaaacgcaggaaatgactgtggttttgaatgatgatatatcgcttgtaaattgcaaatagattttgcatatgatataatggcatcagacacataatatgttccattttgaacaaaacaaaacctctgaaagcggaccagactttcaggggttttctattgccaattattaacatatgtactataataccgataacttaaaatcttaataatgaacttaatcagagagccgaagggtgctacgacagttgccggacttaca

SEQ ID NO: 31879 - DNA, 260 bp, Unknown
  Description of Unknown: RightRegion for integrase B5880 sequence
gccgacggtagttcggatatgaaacgtaattctccaccaaagaaacgacaattttcgtgagaagattgtcgtttctttttgttttgtatgtttatcttttcgtttttctttttttgatttgaaagataacggacaagagaaaaattatgcggaaaccggttttccttatcggtaatgcatcatccgattgcagcttttccgagcaatagcaccgacgccgattgttatcgttttttctattgtgtattagatttaaaaag

SEQ ID NO: 31880 - DNA, 109 bp, Unknown; identical to SEQ ID NO: 31872
  Description of Unknown: RightRegion for integrase B5881 sequence

SEQ ID NO: 31881 - DNA, 109 bp, Unknown
  Description of Unknown: RightRegion for integrase B5882 sequence
gaaacgcaggaaatgaccgttgtgttaaatgatgatatttcccttgcatattgcaaatagattttggatataatacaatgtcatcagacacataatatgttccattttg

SEQ ID NO: 31882 - DNA, 260 bp, Unknown
  Description of Unknown: RightRegion for integrase B5883 sequence
gaaacgcaggaaatgactgttgttttgaatagtgacatatcgcttgtaaattgcaaataggttttgcatatgatataatgtcgtcagacacataatatgttccattttgaacaaaacaaaacccctgaaagtggaccagactttcaggggtttctattgtcaattatttatatatttattataatagcaataatgtaaactcttaataatgaacttaattagagagccgaagggtgctacgacagttgccggacttacaa

SEQ ID NO: 31883 - DNA, 260 bp, Unknown
  Description of Unknown: RightRegion for integrase B5884 sequence
gcgacaggtacgggaaaagacagtgcttgcggacatacactttcaccggctttccgatgatgctttgtcgaactgtgttgttaagacaccaaagcgcgcgggaaacggtcaggctggagacggtatggcttttccccgtcttttcgtcggtaatgacgcatttggccacagcacagacttcgtcgacatccacatcggtgacagtcgccgtgatgcacttccctgttttcttgaggtgttccgctcgtttcctgtcgaac

SEQ ID NO: 31884 - DNA, 260 bp, Unknown
  Description of Unknown: RightRegion for integrase B5885 sequence
gaaagtactgtccccattcaggtacaaatctgtctgtactcaacctcacccgaacaataaaataaatatatttttaagctccttcatcggggcttatttttttgtttcaaaacacgaaagtaaattgactttctaacaaaatctgctataaataaacagattctgttagtttttaacaaaaacgatacagaacagaaataaaattatatatttatagtaaaaggagtcgatttacatggtcaaaagtctattatcaagaa

SEQ ID NO: 31885 - DNA, 260 bp, Unknown
  Description of Unknown: RightRegion for integrase B5886 sequence
gaaacgcaggaaatgactgttgttttgaatagtgatatatcgcttgtaaattgcaaatagatttttcatattatataatgtcattggacaaaagtaaattagtccatgccagacagctaacgaaaaccccgaaagtgtatcagactttcggggtttctattgccaattattaacatctgtactataataccgataactaaaaaacttaataatgaacttaatcagagagccgaagggtgctacgacagttgccggactta

SEQ ID NO: 31886 - DNA, 109 bp, Unknown; identical to SEQ ID NO: 31859
  Description of Unknown: RightRegion for integrase B5887 sequence

SEQ ID NO: 31887 - DNA, 260 bp, Unknown
  Description of Unknown: RightRegion for integrase B5888 sequence
aaaagcccgaaatccaagcccggagactttacacttgaaattatccttaaagacatctaaggttatcaatcttatgataaagactgcgttgagagtctaagattttatcccacacaggcggcacaggaggtgctaagcaccgcgcagatcatcaagggtgggtgcgcagagctgctgtacgtttacaccgatgtagaaccgatcacctttaaccgaggattttactccatagatatgcggtttttctaccgggtgacgct

SEQ ID NO: 31888 - DNA, 109 bp, Unknown
  Description of Unknown: RightRegion for integrase B5889 sequence
gaaacgcaggaaatgaccgtggttttgaatgatgatatatcgcttgtaaattgcaaatagattttgcatatgatataatggcatcagacacataatatgttccattttg

SEQ ID NO: 31889 - DNA, 260 bp, Unknown
  Description of Unknown: RightRegion for integrase B5890 sequence
ttggatagcgaatcagagagcagtggttcggatttgaacgcaaatgctccaccaaattagataccatagattgatacagtgtatccgtctatggtatcgtttttttatgccccgaaatgcccgtatatcaaggctttttgaaacagcgttgtgcatttcctgcccggctgttcccatatgtgccgtttgggaggtgttttcggaggtgttttatgctctcggctaccatctgtagtggtcagtaatcgttaaacgaccgc

SEQ ID NO: 31890 - DNA, 260 bp, Unknown
  Description of Unknown: RightRegion for integrase B5891 sequence
gaaacgcaggaaatgactgttgttttgaacagtgatatatcgcttgtaaattgcaaatagattttgcgtatgtataatatcatcagacacataatatgttctattttgaacaaaacaaatcccctgaaagtataccagactttcaggggatttctaatttatgtattattttttcgtgtcaaatacttatccaatattgttaaaatgttgctattatgaactatcattctatcactctttagtaactcctctgatatatt

SEQ ID NO: 31891 - DNA, 260 bp, Unknown
  Description of Unknown: RightRegion for integrase B5892 sequence
gaagttgttttccatttgaaagaaggaggcgcataccgatggcaaagaccgtgcgggtaatccctgcaagccctaaaatctttcgttctgaggttacggcagaaccaagacggcgaaggacggcaggatatgccagagtttcgaccgatcatgaagaacaggcttccagttacgaaatgcagatggctcattacaagaactacatcgaaagccgtgcagactgggatttcgtcggcatgtattcggacgaggggatcagc

SEQ ID NO: 31892 - DNA, 260 bp, Unknown
  Description of Unknown: RightRegion for integrase B5893 sequence
gggcgaacgctctacgtcctgcccggcgggctgctgctgcgcgcgaggatggcagcctagtaacggcttccgggcatcctcatcgcgccctcggtcgggtagcggaactcgacctcgagccccagccgctccagctcggcagcggcagctcgggcgtttgcgtttgccacgccgtatggcccctcgtctcgcccaaactcgtcgtacatgttcaagcataaaaataggcccccaccgccgaagcgatgggggcctgcggg

SEQ ID NO: 31893 - DNA, 87 bp, Unknown
  Description of Unknown: RightRegion for integrase B5894 sequence
gccgacggtagttcggatatgaaacgtaattctccaccaaagaaacgacaattttcgtgagaagattgtcgtttctttttgttttgt

SEQ ID NO: 31894 - DNA, 93 bp, Unknown
  Description of Unknown: RightRegion for integrase B5895 sequence
atgttaaaagacataagcggtgcgactactaccgacaccgctcagccaaaaaagacctaggcaatagcctaggtctttttcttttgtaaaaat

SEQ ID NO: 31895 - DNA, 87 bp, Unknown
  Description of Unknown: RightRegion for integrase B5896 sequence
gccgacggaagttcggatatgaaacgtaattctccaccaaagaaacgacaattttcgtgagaagattgtcgtttctttttgttttgt

SEQ ID NO: 31896 - DNA, 260 bp, Unknown
  Description of Unknown: RightRegion for integrase B5897 sequence
gccgacggtagttcggatatgaaacgtaattctccaccaaagaaacgacaattttcgtgagaagattgtcgtttctttttgttttgtatgtttatcttttcgtttttctttttttgatttgaaagataacggacaagagaaaaattatgcgaaaaccggttttcgtcatcggtaatgcatcatccgattgcagcttttgccgagcaatagcaccgacgccgattgatatcgttttttctattgtgtattagatttaaaaa

SEQ ID NO: 31897 - DNA, 260 bp, Unknown; identical to SEQ ID NO: 31867
  Description of Unknown: RightRegion for integrase B5898 sequence

SEQ ID NO: 31898 - DNA, 109 bp, Unknown; identical to SEQ ID NO: 31859
  Description of Unknown: RightRegion for integrase B5899 sequence

SEQ ID NO: 31899 - DNA, 109 bp, Unknown; identical to SEQ ID NO: 31881
  Description of Unknown: RightRegion for integrase B5900 sequence

SEQ ID NO: 31900 - DNA, 260 bp, Unknown
  Description of Unknown: RightRegion for integrase B5901 sequence
tcctcagcggattgtgctccctctgcgctggggagccaagctaattttaaggcgacctaaacgagaggtcagagagtaatgtttgttaaactctttttcctcggtgttaggttgccttaaattgttttatatggcagttttcatcattgcagcaagagtattgttttatttatagtatggaagcagggcttccgtatgcttacgtttatgtaagtgtacggaagcctttttttattgtctaaacgaaaggaaagaacgaa

SEQ ID NO: 31901 - DNA, 260 bp, Unknown
  Description of Unknown: RightRegion for integrase B5902 sequence
gctgacggtagttcggatatgaaacgtaattctccaccaaagaaacgacaattttcgtgagaagattgtcgtttctttttgttttgtatgtttatcttttcgcttttctctttttgatttgaaagataacggacaagagaaaaattatgcggaaaccggtctttgtcatcgataatgcatcatccgattgcagcttttgccgagcaatagcaccgacgccgattgttatcgttttttctgttgtgtattagatttaaaaa

SEQ ID NO: 31902 - DNA, 260 bp, Unknown
  Description of Unknown: RightRegion for integrase B5903 sequence
tttaaatctgacacggaaaaactattggatttcatgaactccgaaagggaagaagaataaagccgggataatgcttcacctcctcggcaggacttatacgatatctccgagttaaacaaggagatatcatgagaagaattgacttgatttttattatcagtcttgcgttgttgtgtagtatcaatgtttaatcaaagggagcatatgctccctttttcatttatagctatcgtaagttccagttcttagaacttcggtaa

SEQ ID NO: 31903 - DNA, 260 bp, Unknown
  Description of Unknown: RightRegion for integrase B5904 sequence
aataaaaatcaaaaaaatgatgactttgatataaagttattccctaaaatttacgtctaacatgattaacttatttcattaccttctttatcaacgcctatcggatcatgtaaaaatgtttctcctttttgttttttactacttctaaagagcattaaaatttcattttcaatgcatctagatgcatatgtagctaatcttgttccctttgatgcatcaaatgaatcaattgctttaattaaccctactgtaccgattga

SEQ ID NO: 31904 - DNA, 260 bp, Unknown
  Description of Unknown: RightRegion for integrase B5905 sequence
aatgatgaatacaggggcagtaagtatccaagagacgttattatcgtagctgcaaaataatgatgtgtctattgtgtacgtcggcacattagttccctgggcattaattccagctgcagcgatttgtaatgtcagtccatttgagttagcacgtcgaaacttcatcccagttgtcattggtctagttgtcacgacgatagttgcgatgtttattttataaaaagtaaaacgcttggaagattaactctccaagcgttttt

SEQ ID NO: 31905 - DNA, 260 bp, Unknown
  Description of Unknown: RightRegion for integrase B5906 sequence
aaatggtgcgcccttaaggacctcatcgaacggaagttcttccattttaaaatagcataatccgtgagacagattatattttatctctaaaaccataaggaggtaaaatatggcaaaaatgtcgcttgatcctcgcaatgcgcgggtacatgacaagaagaatgaaaacgctattgcgcaatcactcaggaagaacggtgcggggagatcgattgtcatcgattcggaaaacgtcatcatcggagggaacggagttttcg

SEQ ID NO: 31906 - DNA, 247 bp, Unknown
  Description of Unknown: RightRegion for integrase B5907 sequence
aatatcacctggaacaaagccgccaacaccctcaccatccactaccgcctcgtcctttagtcatgctcattttatggttaattgatatatggaggcccggacggcgagctcggcgcgtcgctgcgctacctctcccagcgctactccatgccctaccccgagctcaagggcctgctgaccgacatcggcacagaggagctggggcatctcgagatggtcggcacgatcgttcaccagcttacgcgca

SEQ ID NO: 31907 - DNA, 260 bp, Unknown
  Description of Unknown: RightRegion for integrase B5908 sequence
aaaggatggaaagaaaaaaaacgattaaaggaggcacagacgaatggaagcagcaattgacactgtccaacaaccgagagtagtcagggtggtaagaaacgtagcgacagcaccattaacggcacaaaagataagagagcagatgatcgatacgcgactccccgttgccgcttatgcgagagtttcgaccacgaacgaagagcaagaggacagtcttgaacgacagaaagcacactacaccgagtacattggcaatcgcc

SEQ ID NO: 31908 - DNA, 137 bp, Unknown
  Description of Unknown: RightRegion for integrase B5909 sequence
gtcatttattacaagaaaactaaggaagatggtatcagtcttgatattatactgctataggttggtatcatcgtgtaccttgttcatgtgttaatacatcaacatctccactagtaccattgaaattagagaagata

SEQ ID NO: 31909 - DNA, 260 bp, Unknown
  Description of Unknown: RightRegion for integrase B5910 sequence
cgtatagatctggacggggaaaatattgatatacattggagcttttcccctgaggcgtagttgataggtggtatatatggaaaaattgcatttcaaagtatcgtcgcctgagaactttattaaactggcctgtaccattctttttgagcggaaagaggaactgctggaagattacggctctacttggcacgatgtgtttgacggggatgcaggagatcaacattttcagcggttcatggaagacttgtttccgaacggct

SEQ ID NO: 31910 - DNA, 260 bp, Unknown
  Description of Unknown: RightRegion for integrase B5911 sequence
atctgctcgttcgggacgattgttcttcttagaataccacgcactaggcttgcggcataatcgcctggtcaccgtgctcgtcgaggtacggcatgaggtacacgccgccctcgtctgtcgtgagcagaaggtactcgcggttgagcttatcgcacacgatttcctgatgcacgccatccggcaaatcgtaaatcgggccatcggttcgcgcgggcgataccgtcatgtcctgcgcccccatggcctgcctggcgcacgag

SEQ ID NO: 31911 - DNA, 260 bp, Unknown
  Description of Unknown: RightRegion for integrase B5912 sequence
aatatcacctggaacaaagccgccaacaccctcaccatccactaccgcctcgtcctttagccatgctcattttatggttaattgatatatggaggcccggacggcgagctcggcgcgtcgctgcgctacctctcccagcgctactccatgccctaccccgagcttaagggcctgctgaccgacatcggtacagaggaagcgtcatggcccccaattttggcacggtatttttccagtccgtccagcacatagacccattt

SEQ ID NO: 31912 - DNA, 109 bp, Unknown
  Description of Unknown: RightRegion for integrase B5913 sequence
gtatttgaccgtgctaccggttccgtgaatatcttcttttatctcgcaaactgcccataaacagcaggctttttaaagttggtacgcaaatgacaaaaggtcatccagt

SEQ ID NO: 31913 - DNA, 260 bp, Unknown
  Description of Unknown: RightRegion for integrase B5914 sequence
aatatcacctggaacaaagccgccaacaccctcaccatccactaccgcctcgtcctttagtcatgctcattttatggttaattgatatatggcggccgatatcccacttatccataaagaaagcgcctcgcgatagggcgctttctttatggataaatttgacaaaccgcaaaaattcctatatggtgtccctatactcccgccgaaataaaaacgaaagagggatattgtgggcctgcttgattttttgtcatcctact

SEQ ID NO: 31914 - DNA, 260 bp, Unknown
  Description of Unknown: RightRegion for integrase B5915 sequence
aatatcacctggaacaaagccgccaacaccctcaccatccactaccgcctcgtcctttagtcatgctcattttatggttaattgatatatggaggcccggacggcgagctcggcgcgtcgctgcgctacctctcccagcgctactccatgccctaccccgagcttaagggcctgctgaccgacatcggtacagaggaagcgtcatggcccccaattttggcacggtatttttccagtccgtccagcacatagacccattt

SEQ ID NO: 31915 - DNA, 260 bp, Unknown
  Description of Unknown: RightRegion for integrase B5916 sequence
aatatcacctggaacaaagccgccaacaccctcaccatccactaccgcctcgtcctttagccatgctcattttatggttaattgatatatggaggcccggacggcgagctcggcgcgtcgctgcgctacctctcccagcgctactccatgccctaccccgagctcaagggcctgctgaccgacatcggcaccgaggaagcgtcatgaaccccaattttggcgcggtatttttccagtccgtccagcacatagacccattt

SEQ ID NO: 31916 - DNA, 260 bp, Unknown
  Description of Unknown: RightRegion for integrase B5917 sequence
gatttggacttatcaagtccaccacaagtcaaaaaatccgaacattatcatcaatggtgatacgttcggatttttgatttttatgagttgttttataatttagaaattactgtggtttgtagcatattctcggcctcctccaagccttgcatcacttccgccatgatgcgagtggccaagataaatcctgaactgaacgcttcacactcagtgatgcaggacagttcacttgtgcagtccttgaatttttcaaaggtttc

SEQ ID NO: 31917 - DNA, 260 bp, Unknown
  Description of Unknown: RightRegion for integrase B5918 sequence
aatatcacctggaacaaagccgccaacaccctcaccatccactaccgcctcgtcctttagtcatgctcattttatggttaattgatgtatggaggcccggacggcgagctcggcgcgtcgctgcgctacctctcccagcgttactccatgccctaccccgagctcaagggcctgctgaccgacatcggcacggaggagctggggcatctcgagatggtcggcacgatcgttcaccagcttacgcgcaatttgaccgagga

SEQ ID NO: 31918 - DNA, 260 bp, Unknown
  Description of Unknown: RightRegion for integrase B5919 sequence
ctatacaaactttatgttacgccgtttgctattttcattcgtgcagcactcataaaataaaaaaacaccgccttaccggacgacatccgatagggcggtgttgcattagaataaagtaaaatttgcgacaagtacaatataccattctttttatgatttgtcaataaaattgcttgtcgaattttgtcgatgaaaattatagcttttcgtccaacgaagccacatgcttcaaaatctgctgcagcgtagattcttcggtg

SEQ ID NO: 31919 - DNA, 260 bp, Unknown
  Description of Unknown: RightRegion for integrase B5920 sequence
cagcagcgcactgaccttgctgaatttgatgaaaccttggttaaacgctggctcaagtaaatcaccgtctgggaagaccacttcacagtggagctcaagtccggactaaaaattgatattgaaggataatgactatagacgcacgaaaccctctcgaccttgaattggccgggagggttgttttttattcgtctttaaggactactattgttgaatcacttaagtaaggatagtaattaaacttttcatctccacatatg

SEQ ID NO: 31920 - DNA, 260 bp, Unknown
  Description of Unknown: RightRegion for integrase B5921 sequence
aatatcacctggaacaaagccgccaacaccctcaccatccactaccgcctcgtcctttagccatgctcattttatggttaattgatatatggaggcccggacggcgagctcggcgcgtcgctgcgctacctctcccagcgctactctatgccctaccccgagctcaagggcctgctgaccgacatcggcacagaggagctggggcatctcgagatggtcggcacgatcgttcaccagcttacgcgcaatttgaccgagga

SEQ ID NO: 31921 - DNA, 260 bp, Unknown
  Description of Unknown: RightRegion for integrase B5922 sequence
agtcggcaaactattttatgtacaacatttcattatttttgcaaaaagaaaatagtataataggggacacataaaaaaatgaaaccgccttaccggatgacatccgatagggcggttttgcattagaataaagtaaaatttgcgacaagtacagtataccatactttttcatgatttgtcaataaagttgcttgccgaattttgtcgatgaaaattatagctttgcatccagagaagccacatgcttcagaatttgcttc

SEQ ID NO: 31922 - DNA, 73 bp, Unknown
  Description of Unknown: RightRegion for integrase B5923 sequence
cagtgttcgcctagaaatgttctggtggatcatcaggggttcgaaccccggacaccctgattaagagtcaggt

SEQ ID NO: 31923 - DNA, 260 bp, Unknown
  Description of Unknown: RightRegion for integrase B5924 sequence
gtatttgaccgtgctaccggttccgtgaatatcttcttttatctcgcaaactgcccataaacagcaggctttttaaagttggtactcaaatgacaaaaggtcatccagttcgggcaagagaccctgtcaccgtcacaatactgcgttaagatcggctgtcttacatttggtctcgacagataatttacaaacatctcatcgacaatccttgaaatattagaaaaaatattccgtccaaatacccacttatggtcaaatgc

SEQ ID NO: 31924 - DNA, 260 bp, Unknown
  Description of Unknown: RightRegion for integrase B5925 sequence
aatatcacctggaacaaagccgccaacaccctcaccatccactaccgcctcgtcctttagccatactcattttatggttaattggtatatggaggcccggacggcgagctcggcgcgtcgctgcgctacctctcccagcgctactccatgccctaccccgagctcaagggcctgctgaccgacatcggcacagaggaagcgtcatggaccccaattttgtcgcggtatttttccggtccgtccagcacatagacccattt

SEQ ID NO: 31925 - DNA, 260 bp, Unknown
  Description of Unknown: RightRegion for integrase B5926 sequence
gtttcggtaaaatgttcggattccgaaagtgtgggtctgccaaaaaggtcggttgcataagcagccgatttttttattcgcttcttgcagaaggacgagaataggacggcagtgaataccgtgccctttggcacggtagagccgtcctgaccgacgagcgtcgagcgaggagaaagagtccttctgcccctgccaaaaaggtcggctgcgaaagcagccgattttttttctctctttgtagaaggacatttttccaattc

SEQ ID NO: 31926 - DNA, 260 bp, Unknown
  Description of Unknown: RightRegion for integrase B5927 sequence
atggaatatgataaggagagggatgagtatagtttttattacaagtttgaaatggaatagtttttctacaaacgtagtgaatactatacaatacacaagtttcaaaatcaacgtatttccgttgtttttggttttcataactctcagctatacggtggacccgatggagaattaggcgctgccatgcgttacctttcccagcgctattccaacacaaaccgaaaagtagccggtgtgcttacggatatcggtaccgagga

SEQ ID NO: 31927 - DNA, 260 bp, Unknown
  Description of Unknown: RightRegion for integrase B5928 sequence
ccagagggcaatggttcggatttaggttgcttcgctccaccaaaaaagttcaacgtatgaaagtgcgttgaactttttgttttgcacaattttccggcggacacagcgggtggatgagaacagctgcggcggtcagctggatctgcagggcggtggcggcggacttctcccggttgatttccgcgccgttctcctgcatgagccagttcagctgttcgtcggtgatgccggggatcttgttcttcacgtcttcgcgtttc

SEQ ID NO: 31928 - DNA, 109 bp, Unknown; identical to SEQ ID NO: 31912
  Description of Unknown: RightRegion for integrase B5929 sequence

SEQ ID NO: 31929 - DNA, 260 bp, Unknown
  Description of Unknown: RightRegion for integrase B5930 sequence
agccggcaaactattttatgtacaacatttcattatttttgcaaaaagaaaatagtataataggggacgcataaaaaaatgaaaccgccttaccggatgaatccgatagggcggttttgcattagaataaagtaaaatttgcgacaagtacagtataccatactttttcatgatttgtcaataaagttgcttgtcgaattttgtcgatgaaaattatagctttgcatccagagaagccacatgcttcagaatttgctgta

SEQ ID NO: 31930 - DNA, 260 bp, Unknown
  Description of Unknown: RightRegion for integrase B5931 sequence
ccggatgaaaaaacgacgctatccgatagttcggataacgtcgatcttggtggagcataggagactcgaactcctgaccccaacactgccagttatgcatttatactttttctaggctcatctaagctcattgaaccctatattttaaagggtttgttaaaattcaaactcatctaagctcatctaaaaccatcgtaattactgtcaaaactactgtcaaaagttagaactaactaactaatatttaaatggttatatag

SEQ ID NO: 31931 - DNA, 260 bp, Unknown
  Description of Unknown: RightRegion for integrase B5932 sequence
gtcatttattacaagaaaactaaggaagatggtatcagtcttgatattatactgctataggttggtatcatcgtgtaccttgttcataaggcacacgatgatataaacacatatatttatgtttaaaagtgatataatataggtgcgtgaagtgggtacacgcagagcatcttttttgtcagttctcctatatattttctctaaaaagggtggtatgagccaccttttttagttgtatgcatttatagctcatttaaagc

SEQ ID NO: 31932 - DNA, 260 bp, Unknown
  Description of Unknown: RightRegion for integrase B5933 sequence
aatatcacatggaacaaagccgccaacaccctgaccgtccactaccgcctcgtcctttagcctgcctattttatggttaattggtattaggtggcccagacggagaattgggtgcatcgctgcgctatctttcccagcgctactccatgccctaccccgaactcaagggactgctgaccgacatcggtacagaggagctgggacatcttgagatggttggcaccatcgtccaccagctcacgcgcaatctgacggaggag

SEQ ID NO: 31933 - DNA, 260 bp, Unknown
  Description of Unknown: RightRegion for integrase B5934 sequence
gacctctcaaacattgagggcggcgagttcgacgagggactcgtcagctccaccaaatagtgcaaatccgaactcattctttttcgtgaagcactgtgtcggatttgttttcatagtagaggacgtaggttaaactgcgtcctcttttttaggtgtctcgtaagtaagagcctgtttggaatctccaatgccagcagtggtcgggtcagtcacgataccgagaatcgtaaggactgcgaacagggcattgacaacagcca

SEQ ID NO: 31934 - DNA, 260 bp, Unknown
  Description of Unknown: RightRegion for integrase B5935 sequence
actatcgcatggaacaaagccgccaacaccctgaccgtccactaccgcctcgtcctttagcctgccatttttatggttaattggtatccggtggcccagacggagaattgggtgcatcgctgcgctatctttcccagcgctactccatgccctaccccgaactcaagggactgctgaccgacatcggcacagaggaagcgtcatggcccccaattttggcgcggtatttttccagtccgtccagcacatagacccatttg

SEQ ID NO: 31935 - DNA, 260 bp, Unknown
  Description of Unknown: RightRegion for integrase B5936 sequence
aatatcacatggaacaaagccgccaacaccctgaccgtccactaccgcctcgtcctttagcctgtcatgtttatggttaattggtatatggaggcccagacggggagcttggtgcatcgctgcgctatctttcccagcgctactccatgccctaccccgaactcaagggactgctgaccgacatcggtacagaggaagcgtcatgaaccccaattttgtcgcggtatttttccagtccgtccagcacatagacccacttg

SEQ ID NO: 31936 - DNA, 260 bp, Unknown
  Description of Unknown: RightRegion for integrase B5937 sequence
ttgatgatttccgcaatttacgccacaagcgaaagtatcaacatcgtttggaagatatgacggcgcataagcgccgccatacaacgcaacctttcgccctttgtaaactaagctacagagaaatttatatgaaaggaattgataccagctattattacgaaggatataccgtttataaagcggaagaactctaaagaaaaagatgagataaccgattttttagaaaaaaataaagcgaaaaattaagaattaaaaatatt

SEQ ID NO: 31937 - DNA, 260 bp, Unknown
  Description of Unknown: RightRegion for integrase B5938 sequence
ctatacaaactttatgttacgtcgtttgctattttcattcgtgcagcactcataaaataaaaaaatgccgccctatcggatgtcgtccggtaaggcggtttcactatttctattctggatacggttcggatttacagcttttcgtctatgtttgccacgtgcttcagaatctgctgcagcgtggattcttcggtgtctggttcgggtgttggctctggttctggctcggtcggctgcgttgttttcgtgaatccgtttaa

SEQ ID NO: 31938 - DNA, 109 bp, Unknown
  Description of Unknown: RightRegion for integrase B5939 sequence
aatatcacatggaacaaagccgccaacaccctgaccgtccactaccgcctcgtcctttagcctgtcatgtttatggttaattggtataaggaggcccggacggcgagct

SEQ ID NO: 31939 - DNA, 260 bp, Unknown
  Description of Unknown: RightRegion for integrase B5940 sequence
atggaatatgataaggagagggatgagtatagtttttattacaagtttgaaatggaatagtttttctacaaacgtagtgaatactatacaatacacaagtttcaaaatcaacgtatttccgttgtttttggttttcataactctcagctatacggcggacccgatggagaattaggcgctgccatgcgttacctttcccagcgctattccaacacaaaccgaaaagtagccggtgtgcttacggatatcggtaccgagga

SEQ ID NO: 31940 - DNA, 260 bp, Unknown
  Description of Unknown: RightRegion for integrase B5941 sequence
aatatcacctggaacaaagccgccaacaccctcaccatccactaccgcctcgtcctttagtcatgctcattttatggttatttgatatatggaggcccggacggcgagctcggcgcgtcgctgcgctacctctcccagcgctactctatgccctaccccgagctcaagggcctgctgaccgacatcggtacggaggagctggggcatctcgagatggtcggcacgatcgttcaccagcttacgcgcaatttgaccgagga

SEQ ID NO: 31941 - DNA, 260 bp, Unknown
  Description of Unknown: RightRegion for integrase B5942 sequence
attttcgaaaagctagcatacaacccgtttgaagatactctagatatttattttaattagtatcggttctgtatccagaggacaccctcttgaagcctcataatatactatcttattatctaaattttcatcttcttcatagggaaatattaattcattcatattcataagaggcctttttccatttgatattacttcaccatcagctttgtaatataaacttcttattgagtttatttctctttctcctaatttatatt

SEQ ID NO: 31942 - DNA, 68 bp, Unknown
  Description of Unknown: RightRegion for integrase B5943 sequence
cctaattctacgctggtggaggcgcggagaatcgaactccggtccacgaaagccccctgattggcatc

SEQ ID NO: 31943 - DNA, 142 bp, Unknown
  Description of Unknown: RightRegion for integrase B5944 sequence
gggagcaatgaaaaagtagaagttgaaatttacattcaatccaatatcatacaaaaataatccttaaaaaagtcctttcaaacaagggctttttttattgtaaacattcaaaccctttaatcttttttaatctttgttttgt

SEQ ID NO: 31944 - DNA, 260 bp, Unknown
  Description of Unknown: RightRegion for integrase B5945 sequence
taccgcctaaacaaaggcggcacgttgtcggatttcacttccaatgcacctgcattgtagaatcccgaaaacttccagataatcaatattatcggaagttgtatgccgcaacgacctttaaggttaaactactccaattattactataccacgacttgattcggtgggcaacaagacaataccagtatttttccgaaatactcttaatatcttccaaacatgaaaagcacccctgccaatccatgtgtcatcgcacattt

SEQ ID NO: 31945 - DNA, 260 bp, Unknown
  Description of Unknown: RightRegion for integrase B5946 sequence
ctatacaaactttatgttacgccgtttgctattttcattcatgcagcactcataaaataaaaaaataccgccctatcggatgtcgtccggtaaggcggtttcactatttctattctggaaacggttcggatttacagcttttcgtctatgtttgccacgtgcttcagaatctgctgcaacgtagattcttcggtgtccggttcaggtattggtgttggctctggttcagttggttgcgttgcttttgcaaatccattcaa

SEQ ID NO: 31946 - DNA, 260 bp, Unknown
  Description of Unknown: RightRegion for integrase B5947 sequence
ctatacaaactttatgttacgccgtttgctattttcattcgtgcagcactcataaaataaaaaaataccgccctatcggatgtcgtccggtaaggcggtttcactatttctattctggaaacggttcggatttacagcttttcgtctatgtttgccacatgcttcagaatttgcttcagcgtggattcttcggtgtccggttcagtcgtctgcgttgctttcgtgaatccgtttaatccggcattctgtatcatggttgg

SEQ ID NO: 31947 - DNA, 260 bp, Unknown
  Description of Unknown: RightRegion for integrase B5948 sequence
aatatcacctggaacaaagccgccaacaccctcaccatccactaccgcctcgtcctttagtcatgctcattttatggttaattgatatatggaggcccggacggcgagctcggcgcgtcgctgcgctacctctcccagcgctactccatgccctaccccgaactcaagggcctgctgaccgatatcggcacagaggagctggggcatttggagatggtcggcacgatcgtccaccagctcacgcgaaatctcacggagga

SEQ ID NO: 31948 - DNA, 260 bp, Unknown
  Description of Unknown: RightRegion for integrase B5949 sequence
aatatcacatggaacaaagccgccaacaccctgaccgtccactaccgtctcgtcctttagcctgccatttttatggttaattggtatcaggtggcccagacggagaattgggtgcatcgctgcgctatctttcccagcgctactccatgccctaccccgaactcaagggactgctgaccgacatcggcacagaggaagcgtcatggccccctatttttgcccggtatttttccagtccgtccagtacatagacccacttg

SEQ ID NO: 31949 - DNA, 260 bp, Unknown
  Description of Unknown: RightRegion for integrase B5950 sequence
atggaatatgataaggagaaggatgagtatagtttttattataagtttgaagcggaatagtttttctacaaacatagtgaatactatacaatacacaagtttcaaaatcaacgtatttccattgtttgtggcttttataactctcagctatgcggtggacccaatggagaattaggcgctgccatgcgttacctttcccagcgctattccaacacaaaccgaaaagtagccggtgtgcttacggatatcggtaccgagga

SEQ ID NO: 31950 - DNA, 260 bp, Unknown
  Description of Unknown: RightRegion for integrase B5951 sequence
aatatcacatggaacaaagccgccaacaccctgaccgtccactaccgcctcgtcctttagcctgcctattttatggttaattggtattaggtggcccagacggagaattgggtgcatcgctgcgctacctctcccagcgctactccatgccctaccccgagctcaagggcctgctgaccgacatcggtacagaggaagcgtcatggcccccaattttggcgcggtatttttctagtccgtccagcacatagacccacttg

SEQ ID NO: 31951 - DNA, 260 bp, Unknown
  Description of Unknown: RightRegion for integrase B5952 sequence
atggaatatgataaggagaaggatgagtatagtttttattataagtttgaagcggaatagtttttctacaaacatagtgaatactatacaatacaaaagttccaaaaacaacgtatttccgttgtttttggcttttataactctcagctatacggtggacccgatggagaattaggcgctgccatgcgttacctttcccagcgctattccaacacaaaccgaaaagtagccggtgtgcttacggatatcggcaccgaaga

SEQ ID NO: 31952 - DNA, 260 bp, Unknown
  Description of Unknown: RightRegion for integrase B5953 sequence
ctatacaaactttatgttacgccgtttgctatttttattcgtgcagcactcataaaataaaaaaagcttgcattttttctttgattatggtatactatagttatagaattgcggtggacgtcttcggactgcacctaaaggagccagatgcgtctgactcctttttctttatatactcataaaataaaaaaataccgccctatcggatgtcgttcggtaaggcggtttcactatttctattctggatacggttcggattt

SEQ ID NO: 31953 - DNA, 260 bp, Unknown; identical to SEQ ID NO: 31783
  Description of Unknown: RightRegion for integrase B5954 sequence

SEQ ID NO: 31954 - DNA, 260 bp, Unknown
  Description of Unknown: RightRegion for integrase B5955 sequence
aaaggatggaaagagaaaaaacgattaaaggaggcacagacgaatggaagcagcaattgacactgtccaacaaccgagagtagtaagggtggtaagaaacgtagcgacagcaccattaacggcacaaaagataagagagcagatgatcgatacgcgactcccagttgccgcttatgcgagagtttcgaccacgaacgaagagcaagaggacagtcttgaacgacagaaaacacactacaccgagtacatcggcaatcgcc

SEQ ID NO: 31955 - DNA, 260 bp, Unknown
  Description of Unknown: RightRegion for integrase B5956 sequence
gtatttgaccgtgctaccggttccgtgaatatcttcttttatctcgcaaactgcccataaacagcaggctttttaaagttggtacgcaaatgacaaaaggtcatccagttcgggcaagagaccctgtcaccgtcacaatactgcgttaagatcggctgtcttacatttggtctcgacagatagttcacaaacatctcatcgacaatccttgagatattagaaaaaatattccgtccaaatacccatttatggtcaaatgc

SEQ ID NO: 31956 - DNA, 260 bp, Unknown
  Description of Unknown: RightRegion for integrase B5957 sequence
catcaggtatgcattgccgttttcggcaaaagcatattgctgagaataactttcggctagtcatcggtcaacagtcttcatcatatcgtcccgcccgaaaagcagagcatgggcgatttcacgctaacttgaattctagtacttgatcttctgcccgacgtagatgcgattcgggttcgaaatcccgttcttgttggcgaggcccgcccagttggagccccagccgaccttctgggcgatgccggacagcgtgtcgccgg

SEQ ID NO: 31957 - DNA, 260 bp, Unknown
  Description of Unknown: RightRegion for integrase B5958 sequence
ccagagggcaatggttcggatttgggttgcttcgctccaccaaaaaagttcaacgtatgaaagtgcgttgaactttttgttttgcacaattttccggcggacacagcgggtggatgagaacagctgcggcggtcagctgggtctgaagggcggtggtggcggacttctcccggttgatgtccgcgccgttctcctgcatgagccagttcagctgctcgtcggtgatgccgggaatcttgttcttcacatcttcgcgtttc

SEQ ID NO: 31958 - DNA, 260 bp, Unknown
  Description of Unknown: RightRegion for integrase B5959 sequence
gtcattaaagaaataaggattgacaatgaccagaatatcacgggtgttgtttttgggtagtgttgtactaacttaacactacccgtcggctcatcagcgaatataactgacggatgtgtaatcagtgcccttgcgattgcaactctctgctgttcaccacctgacatctgtgcaggaaatttatccttacagtaatctatgccaagtgattccattaattcagtgactttctcctcatcagcttgctcactgtcaagaat

SEQ ID NO: 31959 - DNA, 109 bp, Unknown
  Description of Unknown: RightRegion for integrase B5960 sequence
tgtgtgcccttaaatagcgtgattgagggggttcgcctacgttcacgcggagtggactagacgggagtcgaacccgtgtccaaaaaccaatcccctgtccttctacgag

SEQ ID NO: 31960 - DNA, 260 bp, Unknown
  Description of Unknown: RightRegion for integrase B5961 sequence
atggaatatgataaggagaaggatgagtatagtttttattataagtttgaagcggaatagtttttctacaaacatagtgaatactatacaatacacaagtttcaaaatcaacgtatttccattgtttgtggcttttataactctcagctatgcggtggacccgatggagaattaggcgctgccatgcgttacctttcccagcgctattccaacacaaaccgaaaagtagccggtgtgcttacggatatcggtaccgagga

SEQ ID NO: 31961 - DNA, 260 bp, Unknown
  Description of Unknown: RightRegion for integrase B5962 sequence
gtatcagataattcgttcgcctgctgcaaggaatggggagccaaactttcgttaaagtgaccatattgaataggaatgagaacaacatttgcaaagctctattctacgtcatttaagcctgttttataaggcttgtgacaattcaatggtcgctttaattttttgcccgaaaatagtaaatacagggtgttttaaactcccgtagcttatgaactataaaaagttcgtaagctgcgggagttttttgttttatcgctcca

SEQ ID NO: 31962 - DNA, 260 bp, Unknown
  Description of Unknown: RightRegion for integrase B5963 sequence
gtatttgaccgtgctaccggttccgtgaatatcttcttttatctcgcaaactgcccataaacagcaggctttttaaagttggtactcaaatgacaaaaggtcatccagttcgggcaagagaccctgtcaccgtcacaatactgcgttaagatcggctgtcttacatttggtctcgatagatagttcacaaacatctcatcgacaatccttgaaatattagaaaaaatattccgtccaaatacccatttatggtcaaatgc

SEQ ID NO: 31963 - DNA, 260 bp, Unknown
  Description of Unknown: RightRegion for integrase B5964 sequence
tatatggaatatgataaggagaaggatgagtatagtttttattataagtttgaagaataaaaaaacgaaaattaaggagtgccatattgctatggacactccttataaaagcgatctgcttttcaatgatactaatagtatatgcatttttttataatttgtcaacaactttttttatgaatttgtactgcgttttaattacattatttttttcaaagtatgtcttgtttttcagcatcctaacattcaccaactcattt

SEQ ID NO: 31964 - DNA, 260 bp, Unknown
  Description of Unknown: RightRegion for integrase B5965 sequence
gataaagaaacgcaggaaatgactgtggttttgaatggaaatattttgacagccaagtaaaaatcccccgaaagttttatacactttcgggggattttttactattcttttagacggtatatcactattaaatatatattctgtaataattaatgctgcccaaacttaagaagtccctcatttgcagttattatttttaaatcagtaccataattcagaaaatcactgtcatgcgtaattaaataagcattttccctttt

SEQ ID NO: 31965 - DNA, 260 bp, Unknown
  Description of Unknown: RightRegion for integrase B5966 sequence
tatatggaatatgataaggagaaggatgagtatagtttttattataagtttgaagaataaaaaacgaaaattaaggagtgccatattgctatggacactccttataaaagcgatctgcttttcaatgatactaatagtatatgcatttttttataatttgtcaacaactttttttatgaatttgtactgcgttttaattacattatttttttcaaagtatgtcttgtttttcagcatcctaacattcaccaactcattta

SEQ ID NO: 31966 - DNA, 260 bp, Unknown
  Description of Unknown: RightRegion for integrase B5967 sequence
aaaggcgttcaaccaaaagggtttaccctcgaggtttttttacattgcctgtacttatagcttgcacaatgctttgaataacgagatgcaagctatagagtaggttaaaacgccacaataaccctgtacctctcatcaagcacttcgccggtattgccccgctcatcaagctgccaagcggtacgcgcagaaaacaagaacacatgcacgtggtcggtatgtacggcgacggcatagaccgccacggtcgaaagcgttgt

SEQ ID NO: 31967 - DNA, 260 bp, Unknown
  Description of Unknown: RightRegion for integrase B5968 sequence
agaatcgatgataataagaattctaaaatggatattcgtatttatattatttttaaataattatatgtattatattgtatttgtatgtatataatcttgaacattgcttctgctacaccgcgacaacattcaacaacaatttttcctttttcgccgatatgagcaagagctacaccgaagaaacagctaaagaagatgatttgtaacatatcgcttttagcgcaagcttcaacaatgttagcaggaatgatatttaataa

SEQ ID NO: 31968 - DNA, 260 bp, Unknown
  Description of Unknown: RightRegion for integrase B5969 sequence
tatatggaatatgataaggagaaggatgaatatagtttttattataagtttgaagaataaaaaaacgaaaattaaggagtgccatattgctatggacactccttataaaagccatctgcttttcaatgatactaatagtatatgcatttttttataatttgtcaacaactttttttatgaatttgtactgtgttttaattacattatttttttcaaagtatgtcttgtttttcagcatcctaacattcaccaactcattt

SEQ ID NO: 31969 - DNA, 165 bp, Unknown
  Description of Unknown: RightRegion for integrase B5970 sequence
gatatggaatggtacacccaaagtgtagagccaactacccgcagcttgagctcaaaataagttacaacccattggtctgaaacgaaaaactatcgttctgacctgatggttttgcaaggcttccaagatcgtaaaaacggcacttttcggcactttttcccttgt

SEQ ID NO: 31970 - DNA, 260 bp, Unknown
  Description of Unknown: RightRegion for integrase B5971 sequence
gataaagaaacacaggaaatgactgtggttttgaatcaagatattgtaacctgtatttagtaaacataatgcctatggaagtcaaatacactttcatgggcattcttgtttcaatatagaaattctatttttgttgtaaactatttgcagatataatataatagtcataatttaataatgaatttaatcagggagccgaagggtgctacgacagttgccggacttacaaaggaagggagctgatgccaatggttacatac

SEQ ID NO: 31971 - DNA, 260 bp, Unknown
  Description of Unknown: RightRegion for integrase B5972 sequence
tatatggaatatgataaggagaaggatgaatatagtttttattataagtttgaagaataaaaaaacgaaaattaaggagtgccatattgctatggacactccttataaaagcgatctgcttttcaatgatactaatagtatatgcatttttttataatttgtcaacaactttttttatgaatttgtactgcgttttaattacattatttttttcaaagtatgtcttgtttttcagcatcctaacattcaccaactcattt

SEQ ID NO: 31972 - DNA, 260 bp, Unknown
  Description of Unknown: RightRegion for integrase B5973 sequence
aaaggcgcaaaacccgcagattttaccctggatgtttatttgttgcctatatacctctaaagcgacagtactatgaatgctactaacgctttagaggacatttctctaacaaaaaagccccggatctcaccagagaaaccggggcctcagtcgagcaaaatttttgctgatctattgcttttgtgttcaccgcatgatacactgtacttgaaaattgagaatcattttgataactcggcatatactacaagaaatggagg

SEQ ID NO: 31973 - DNA, 260 bp, Unknown; identical to SEQ ID NO: 31963
  Description of Unknown: RightRegion for integrase B5974 sequence

SEQ ID NO: 31974 - DNA, 260 bp, Unknown
  Description of Unknown: RightRegion for integrase B5975 sequence
aaaggcgttcaaccaaaagggtttaccctcgaggtttttttacattgcctgtacttatagcttgcgcaatgttatgataaagactgcttagaggatttacgtgtgctgtttcccgcctcggtgcagcccattgtggacgcttccgctaatgtgcgggtacgggacgttgatgtaatctctgtgtacattgatatgcagccgatcccctttaaccgcgggtattattccattgatctcacgtttttctttgacgtatcttt

SEQ ID NO: 31975 - DNA, 101 bp, Unknown
  Description of Unknown: RightRegion for integrase B5976 sequence
atcttacagaatcctgtaagaatagagagttcgtatctaaatcaaatggtgacccggtagggattcgaaccctagacctactgattcgtagtcagtcactc

SEQ ID NO: 31976 - DNA, 260 bp, Unknown; identical to SEQ ID NO: 31963
  Description of Unknown: RightRegion for integrase B5977 sequence

SEQ ID NO: 31977 - DNA, 260 bp, Unknown
  Description of Unknown: RightRegion for integrase B5978 sequence
aaaggcgttcaaccaaaagggttcaccctcgaggtttttttacattgcctgtacttatagcttgcgcaatgttatgataaagactgcttagaggatttacgtgtgctgtttcccgcctcggtgcagcccgttgtggacgcttccgctaatgtgcgggtgcgggacgttgatgtaatctctgtgtacattgatatgcagccgatcccctttaaccgcgggtattattccattgatctcacgtttttctttgacgtatcttt

SEQ ID NO: 31978 - DNA, 70 bp, Unknown
  Description of Unknown: RightRegion for integrase B5979 sequence
acgtaccgcctaaacaaaggcggcacgttgtcggatttcacttccaatgcaccagcataggtatccaatg

SEQ ID NO: 31979 - DNA, 260 bp, Unknown; identical to SEQ ID NO: 31965
  Description of Unknown: RightRegion for integrase B5980 sequence

SEQ ID NO: 31980 - DNA, 260 bp, Unknown
  Description of Unknown: RightRegion for integrase B5981 sequence
tatatggaatatgataaggagaaggatgagtatagtttttattataagtttgaagaataaaaaaacgaaaattaaggagtgccatattgctatggacactccttataaaagccatctgcttttcaatgatactaatagtatatgcatttttttataatttgtcaacaactttttttatgaatttgtactgcgttttaattacattatttttttcaaagtatgtcttgtttttcagcatcctaacattcaccaactcattt

SEQ ID NO: 31981 - DNA, 260 bp, Unknown
  Description of Unknown: RightRegion for integrase B5982 sequence
cagctcatccgtgtcatctatgcgaccagcgattccatcaagatcgaatggcgcatttaaaggcttgttatttccatcttgtacgcttcggtgaaggcctgcgcctcgccaaggaccgcctggacgagaaaaacgtctactacgtaaacccaagttttgatcagtaaaatagaaaaaggaagtctctgccggttggcagagacttcctttttatggagggatacggcaatgagaatccgggagcgtttcaacccacgcgc

SEQ ID NO: 31982 - DNA, 260 bp, Unknown
  Description of Unknown: RightRegion for integrase B5983 sequence
tatatggaatatgataaggagaagaatgaatatagtttttattataagtttgaagaataaaaaaacgaaaattaaggagtgccatattgctatggacactccttataaaagcgatctgcttttcaatgatactaatagtatatgcatttttttataatttgtcaacaactttttttatgaatttgtactgcgttttaattacattatttttttcaaagtatgtcttgtttttcagcatcctaacattcaccaactcattt

SEQ ID NO: 31983 - DNA, 260 bp, Unknown
  Description of Unknown: RightRegion for integrase B5984 sequence
aaaagcgttcaaccaaaagggttcaccctcgaggtttttttacattgcctgtacttatagcttgcgcaatgttatgataaagactgcttagaggatttacgtgtgctgtttcccacctcggtgcagcccattgtggacgcttccgctaatgtgcgggtgcgggacgttgatgtaatctctgtgtacattgatatgcagccgattccctttaaccgcgggtattactccattgatctcacgtttttctttgacgtatcttt

SEQ ID NO: 31984 - DNA, 260 bp, Unknown
  Description of Unknown: RightRegion for integrase B5985 sequence
aaaggcgttcaaccaaaagggttcaccctcgaggtttttttacattgcctgtacttatagcttgcgcaatgctttgataaagactgcttagaggatttacgtgtgctgtttcccgcctcggtgcagcccgttgtggacgcttccgctaatgtgcgggtgcgggacgttgatgtaatctctgtgtacattgatatgcagccgatcccctttaaccgcgggtattattccattgatctcacgtttttctttgacgtatcttt

SEQ ID NO: 31985 - DNA, 260 bp, Unknown
  Description of Unknown: RightRegion for integrase B5986 sequence
aaaggcgttcaaccaaaagggtttaccctcgaggtttttttacattgcctgtacttatagcttgcgcaatgctttgaataacgagatgcaagctatagggtaggttaaaacgccacaacaaccctatacctctcatcaagcacttcgccggtattgccccgcgcgtcaagctgccacacggtctgcacggagaacaagaacacatgcacgtggtcggtatgtacggcgacggcatagaccgccacggtcgaaaatgttgt

SEQ ID NO: 31986 - DNA, 260 bp, Unknown; identical to SEQ ID NO: 31963
  Description of Unknown: RightRegion for integrase B5987 sequence

SEQ ID NO: 31987 - DNA, 260 bp, Unknown; identical to SEQ ID NO: 31968
  Description of Unknown: RightRegion for integrase B5988 sequence

SEQ ID NO: 31988 - DNA, 109 bp, Unknown
  Description of Unknown: RightRegion for integrase B5989 sequence
acctaccgcctgtcgaaagacggtaggttatcggattacgcttccaatactccattataggcttcaagcactttacttgcagataccttactcttcacttcatttcttc

SEQ ID NO: 31989 - DNA, 260 bp, Unknown
  Description of Unknown: RightRegion for integrase B5990 sequence
gataaagaaacacaggaaatgactgtagttttgaacgaggatattttagcagctaagtaaaaatcccccgaaagtttgatacactttcgggggattttttactattctttcagacggtatatcactattaaatatatattctgtataattaatgctgcccaaacttaagaagtccctcatttgcagttattatttttaaatcagtaccataattcagaaaatcactgtcatgcgtaattaaataagcattttcccttttt

SEQ ID NO: 31990 - DNA, 260 bp, Unknown
  Description of Unknown: RightRegion for integrase B5991 sequence
aaaggcgttcaaccaaaagggtttaccctcgaggtttttttacattgcctgtacttatagcttgcgcaatgctttgataaagactgcttagaggatttacgtgtgctgtttcccgcctcggtgcagcccgttgtggacgcttccgctaatgtgcgggtgcgggacgttgatgtaatctctgtgtacattgatatgcagccgatcccctttaaccgcgggtattattccattgatctcacgtttttctttgacgtatcttt

SEQ ID NO: 31991 - DNA, 260 bp, Unknown
  Description of Unknown: RightRegion for integrase B5992 sequence
gccccagagggcaatggttcggatttaggttgcttcgctccaccaaagaaaaacacctaggaacgcaagttcttgggtgttttctttttgctgtaacccactatgaaacccactttttaacctcaaagaaacaatggcggagaaatgagatattcaaaagaaagactccagcgtgtcgacgatatgatctttgaaataatgaagagcgttgaggtgcgcccagatagggcattgtgtagtgtagcgtaagggactacccc

SEQ ID NO: 31992 - DNA, 260 bp, Unknown
  Description of Unknown: RightRegion for integrase B5993 sequence
aaaggcgttcaaccaaaagggtttaccctcgaggtttttttacattgcctgtacttatagcttgcacaatgctttgataaagactgcttagaggatttacgtgtgctgtttcccgcctcggtgcagcccgttgtggacgcttccgctaatgtgcgggtgcgggacgttgatgtaatctctgtgtacattgatatgcagccgatcccctttaaccgcgggtattattccattgatctcacgtttttctttgacgtatcttt

SEQ ID NO: 31993 - DNA, 260 bp, Unknown
  Description of Unknown: RightRegion for integrase B5994 sequence
gaattaattcagaaaatcgacttgtctgacgacaaaattaatattgtatggaagtattaattttatcttgttttatcctcgttgtatttttataactaatgttgacagtttagactggaaaaatctatctgcggcagacatcaccgcccgcgttaccaaccgggtgaaacccgggtctgttatgctgttccacaacggcgccaaaaacacgccggaggctttgccgcaggtgattgaaaagcttcaggccgatgggttta

SEQ ID NO: 31994 - DNA, 260 bp, Unknown
  Description of Unknown: RightRegion for integrase B5995 sequence
acgtaccgcctaaacaaaggcggcacgttgtcggatttcgcttccaatgcaccaagttagaacgctgaaagagctggatgaaagccaaccgtgggcagttttcatgaagaggattaaccgaaaaactttggtggtctgtgaaagttgtcacacgaaaattcacggtgcaggctgtgaatgaatagagagccggatacagcgagagttgtaagtccggttcgggggcgagtgcctggaaacctaccgcagcaatgcggcaa

SEQ ID NO: 31995 - DNA, 260 bp, Unknown
  Description of Unknown: RightRegion for integrase B5996 sequence
tcatatacaaacgggagggcaggaaacgtaaatggaaaactctgcaagcgtaaagcctaaaatcaggctgataccagcgaaacaaaggcaggaactggtcggcagggcaacgccgaacggggaattggcaaaactgcgtattgctccatatgcaagagtgtcgacagaccatgaagaacaggagagtagttacgaggcgcaggtaaagcactttaaacaactgattgaaagtcatactgattgggagttggtggatatct

SEQ ID NO: 31996 - DNA, 260 bp, Unknown; identical to SEQ ID NO: 31963
  Description of Unknown: RightRegion for integrase B5997 sequence

SEQ ID NO: 31997 - DNA, 260 bp, Unknown; identical to SEQ ID NO: 31974
  Description of Unknown: RightRegion for integrase B5998 sequence

SEQ ID NO: 31998 - DNA, 260 bp, Unknown
  Description of Unknown: RightRegion for integrase B5999 sequence
aaaggcgttcaaccaaaagggtttaccctcgaggtttttttacattgcctgtacttatagcttgcgcaatgttatgaataacgagatgcaagctatagagtaggttaaaacgccacaataaccctatacctctcatcaagcacttcgccggtattgccccgctcatcaagctgccaagcggtatgcgcagagaacaagaacacatgcacgtggtcggtatgtacggcgacggcatagaccgccacggtcgaaaatgttgt

SEQ ID NO: 31999 - DNA, 109 bp, Unknown
  Description of Unknown: RightRegion for integrase B6000 sequence
gccccagagggcaatggttcggatttgggttgcttcgctccaccaaaaggaccagcgtagaaattacgctggttttttgttttgcccggcatcttaagtctcactctcg

SEQ ID NO: 32000 - DNA, 260 bp, Unknown
  Description of Unknown: RightRegion for integrase B6001 sequence
cagctcatccgtgtcatctatgcgaccagcgattccatcaagatcgaatggcgcatttgaaggcttgttatttccatcttgtacgcttcggtgaaggcctgcgcctcgccaaggaccgcctggacgagaaaaacgtctactacgtaaacccaagctttgatcagtaaaatagaaaaatgaaaggaagtctctgccggttggcagagacttcctttttatggagggatacggcaatgagaatccgggagcgtttcaaccca

SEQ ID NO: 32001 - DNA, 260 bp, Unknown
  Description of Unknown: RightRegion for integrase B6002 sequence
aaccgtcaaaatgatactttaaaaatctactactttttatataaatctaattgtggataactttttaaaatcaccactttttaacactataattttatgatacaatttgttgcaaagcctttaaatataaggctttgctgtactttatatgttcttgagaaaaggttgacgcagtggggttcgaaggctctgggcgatcagggttattctgccattgaaatcctacgctactattatggggacgatatgtacatcaatac

SEQ ID NO: 32002 - DNA, 260 bp, Unknown
  Description of Unknown: RightRegion for integrase B6003 sequence
gttggtaaagatggcgaaaaaagttacagttatacctgcaaaacaggtcagagcaaatagtacaaaagcaatatcggctgtaagaaaaacaagagttgcggcatattgccgtgtatcgaccgatgctgaagagcagcttaattcttttgacaatcaggtagagtattacaccaggtatatcaatgagaatccggcatatgagatggttggtatttatgcggatgaaggtatctccggaaccaataccaagaagcgtaagg

SEQ ID NO: 32003 - DNA, 260 bp, Unknown
  Description of Unknown: RightRegion for integrase B6004 sequence
aaaggcgttcaaccaaaagggtttaccctcgaggtttttttacattgcctgtacttatagcttgcacaatgttatgataaagactgcttagaggatttacgtgtgctgtttcccgcctcggtgcagcctgttgtggacgcttccgctaatgtgcgggtgcgggacgttgatgtaatctctgtgtacattgatatgcagccgatcccctttaaccgcgggtattactccattgatctcacgtttttctttgacgtatcttt

SEQ ID NO: 32004 - DNA, 260 bp, Unknown
  Description of Unknown: RightRegion for integrase B6005 sequence
aaaggcgttcaaccaaaagggtttaccctcgaggtttttttacattgcctgtacttatagcttgcgcaatgctttgataaagactgcttagaggatttacgtgtgctgtttcccgcctcggtgcagcccgttgtggacgcttccgctaatgtgcgggtgcgagacgttgatgtaatctctgtgtacattgatatgcagccaatcccctttaaccgcgggtattattccattgatctcacgtttttctttgacgtatcttt

SEQ ID NO: 32005 - DNA, 76 bp, Unknown
  Description of Unknown: RightRegion for integrase B6006 sequence
aaaggcgcaaaacccgcagattttaccctggatgtttatttgttgcctatatacctctaaagcgacagtactatga

SEQ ID NO: 32006 - DNA, 260 bp, Unknown
  Description of Unknown: RightRegion for integrase B6007 sequence
aaaggcgcaaaacctaaggatttcgcgcttgaggtctatctgagaaaggtctatttatagcttgcaccgtgcagcgataaagactgcttagaggatttacgtgtgctgtttcccgcctcggtgcagcccgttgtggacgcttccgctaatgtgcgggtgcgggacgttgatgtaatctctgtgtacattgatatgcagccgatcccctttaaccgcgggtattattccattgatctcacgtttttctttgacgtatcttt

SEQ ID NO: 32007 - DNA, 260 bp, Unknown
  Description of Unknown: RightRegion for integrase B6008 sequence
tatatggaatatgataaggagaaggatgaatatagtttttattataagtttgaagaataaaaaaactaaggccgggtgcgacataatcgtcgccccagccattacaaaacatgacaaatacctttcatatcaggtatactgacaatcaagatttctatgttctaatgttctatcatcttcttttctcattagataaacagtaatcttgattacaaaaaaataataacctaattgatttaatgagccaatccgctttatct

SEQ ID NO: 32008 - DNA, 260 bp, Unknown; identical to SEQ ID NO: 31964
  Description of Unknown: RightRegion for integrase B6009 sequence

SEQ ID NO: 32009 - DNA, 260 bp, Unknown
  Description of Unknown: RightRegion for integrase B6010 sequence
aacatcaaagattggaagttaaaacaaaaacaacggagggaggaacagaatggacagtaatcagagaatcgtgcggacaatccccgcatcgtttacgaggacaacctcgcaagtcgttcggctgctaaatgtaggtgcatatgctcgagtaagtacaaaaaaggaagaacaggaggacagttacgaacggcagggttcgcattatacgaaatatatcaaatcccatgatggttggcaatttgtggacgtatatgcggatg

SEQ ID NO: 32010 - DNA, 260 bp, Unknown
  Description of Unknown: RightRegion for integrase B6011 sequence
atagataaaatagagctgaatgcagatggaagcattgctatctactggaaatttgcgtaattttttttacgcaaattttctacaactaataatacatgggttcatccaactgttattagttgtagaaagacacagtgcatatataatatgaagaaactaaataaaataaggcagcccggaaagatataccggagctgcctttgtgtattatttcaaggtgtataagatgcatttcccccttaaaccccctctgcgccaca

SEQ ID NO: 32011 - DNA, 109 bp, Unknown
  Description of Unknown: RightRegion for integrase B6012 sequence
acgtaccgcctaaacaaaggcggcacgttgtcggatttcacttccaatgcacctccttagtcagcttcctttcttctgaaaccatcgtctgggcctgtatccgcagcgg

SEQ ID NO: 32012 - DNA, 260 bp, Unknown; identical to SEQ ID NO: 31964
  Description of Unknown: RightRegion for integrase B6013 sequence

SEQ ID NO: 32013 - DNA, 260 bp, Unknown
  Description of Unknown: RightRegion for integrase B6014 sequence
gtatttgaccgtgctaccggttccgtgaatatcttcttttatctcgcaaactgcccataaacagcaggctttttaaagttggtactcaaatgacaaaaggtcatccttttatcatttgagtaccaacaaataattttcgatcaatctttattatttatagcttcacaactatgttatttatcatatcatagtttattcattaaaaaaagccggaatttcttccggctttcaaaagttcatgcgtatttactaatacccaa

SEQ ID NO: 32014 - DNA, 260 bp, Unknown
  Description of Unknown: RightRegion for integrase B6015 sequence
tatatggaatatgataaggaaaaggatgagtatagtttttattataagtttgaagaataaaaaggccagaaaagaaaatttcttttctggccaacaatgtatacgttacttaaaaaatggtatcctctcctgtgttcattttgaaccctcctttattcttctcgtttatactaataatattcccaattatacaatttgtcaactcttaaaatcagttacggtagtccccttaatggtattttttgtattatttttatata

SEQ ID NO: 32015 - DNA, 260 bp, Unknown
  Description of Unknown: RightRegion for integrase B6016 sequence
ttcgaccgaatgaacgccagctccaccatacgttcgccagtcgaactgtatccactgtgagtattattccggtggatttgcggttttgatttggctttagacaaaacggatgggtgcagctgctgcattcatccgtttttttgtttgtttgcttgctacaataatatcgccacaaccgcaggcattcgcttgctgaacctacatacgaacgacagttctttcgagaacccgaatcggagggcaccgtcctctgttgggct

SEQ ID NO: 32016 - DNA, 260 bp, Unknown
  Description of Unknown: RightRegion for integrase B6017 sequence
tatatggaatatgataaggagaacgatgagtatagtttttattataagtttgaagaataaaaaaacgaaaattaaggagtgccatattgctatggacactccttataaaagcgatctgcttttcaatgatactaatagtatatgcatttttttataatttgtcaacaactttttttatgaatttgtactgcgttttaattacattatttttttcaaagtatgtcttgtttttcagcatcctaacattcaccaactcattt

SEQ ID NO: 32017 - DNA, 260 bp, Unknown
  Description of Unknown: RightRegion for integrase B6018 sequence
tatatggaatatgataaggagaaggatgagtatagtttttattataagtttgaagaataaaacaaggctgaaacttcattgtttcagccttttaaaattttaatgccttaatataaatttacaacttttacctgtttcaaaatcagcaattttcaaatcgtttttcctatactctctcttaatacactttgatgtgtttgaaaacggatgtgtcccttgcaaagtaaacacaaacctagtattctcttccataggatact

SEQ ID NO: 32018 - DNA, 260 bp, Unknown
  Description of Unknown: RightRegion for integrase B6019 sequence
aatacggcggggtggttagaccgccgattggatagattaagtaaggagggcaaacaatgagcatacctcaaaggatagtgcaagaaagaccagtcatatacagaccgacaaatacggcaagcggcattcacaaggagaacgtaacctactatgctcgtgtaagtacccaaaacgatgaacaggaagactcatacgaaagacaaaaggctcacttcgaagagaagatccactcaaacccgaattggaactatgtcgaagga

SEQ ID NO: 32019 - DNA, 109 bp, Unknown
  Description of Unknown: RightRegion for integrase B6020 sequence
gtttttaacaaaaaatcagaaaatatcgacgtttacttctatacgctcaaacccttgtaaatactgggtttgagcgtggtgagtacgcaaacgcaaaaaggtcatccac

SEQ ID NO: 32020 - DNA, 109 bp, Unknown
  Description of Unknown: RightRegion for integrase B6021 sequence
gtgtttaataaaaaagagtccactattgatgtttacttttatacctccaaccccttgtaaatactggggttggagagagtttatacgcaaacgcaatctggtcatccag

SEQ ID NO: 32021 - DNA, 260 bp, Unknown
  Description of Unknown: RightRegion for integrase B6022 sequence
accaattctcttatggtggaggtgcggagaatcgaactccggtccacgaaagccccctgatcggcatctccaagctcagtcgctgatttaatcttggacgcgttgcgcgcagcgacacgctcgcagcatcccaaccggttcggtcttagcccgcgccataccggttacgtgcgcgggagcattcccctaaaatgacgtcgcaccggtgtcggggaaatcaccgggttgacgcgccagctataaattaagcagcgagagcc

SEQ ID NO: 32022 - DNA, 260 bp, Unknown
  Description of Unknown: RightRegion for integrase B6023 sequence
actaattctcttatggtggagccgcggagaatcgaactccggtccacgacagctccctgatcggcatctccaggctcagtcactcatttagtctcggacacattgcgcggagcgacacgctctcagtgccccaatcggttcggtcttagcccgcgccataccgattacgtgcgcgggagcattcccctcaaatgacgtcgcgccggtgtcggggaaatcaccgggttgacgcgccgctataaattaagcagcgagagcca

SEQ ID NO: 32023 - DNA, 260 bp, Unknown
  Description of Unknown: RightRegion for integrase B6024 sequence
aatacggcggggtggttagaccgccgattggatagattaagtaaggagggcaaacaatgagcatacctcaaaggatagtgcaagaaagaccagtcatatacagaccgacaaacacggcaagcggcattcacaaggagaacgtaacctactatgctcgtgtaagtacccaaaacgatgaacaggaagactcatacgaaagacaaaaggctcacttcgaagagaagatccactcgaatccgaattggaactatgtcgaagga

SEQ ID NO: 32024 - DNA, 260 bp, Unknown
  Description of Unknown: RightRegion for integrase B6025 sequence
gtgtttaataaaaaagaggccactattgatgtttacttttatacctccaaccccttgtaaatactggggttggagagagtttatacgcaaacgcaatctggtcatccagctcggacaggagaccttctgtccgtcacagtactgcgtcagaatcggctgcttcacattaggtctcgacagatagttttcaaacatttcatttactatcagcgagatattgtcatatatatttctgccatagatgaatttgtggtcatatg

SEQ ID NO: 32025 - DNA, 260 bp, Unknown
  Description of Unknown: RightRegion for integrase B6026 sequence
gtatttaataaaaaagaggccactattgatgtttacttttatacctcaaaccccttgtaaatactggggtttgagagagtttatacgcaaacgcaatctggtcatccagctcggacaggagaccttctgtccgtcacagtactgcgtcagaatcggctgcttcacattaggtctcgacagatagttttcaaacatttcatttactatcagcgagatattgtcatatatatttctgccatagatgaatttgtggtcatatg

SEQ ID NO: 32026 - DNA, 109 bp, Unknown; identical to SEQ ID NO: 32019
  Description of Unknown: RightRegion for integrase B6027 sequence

SEQ ID NO: 32027 - DNA, 109 bp, Unknown; identical to SEQ ID NO: 32020
  Description of Unknown: RightRegion for integrase B6028 sequence

SEQ ID NO: 32028 - DNA, 260 bp, Unknown
  Description of Unknown: RightRegion for integrase B6029 sequence
gtgtttaataaaaaagagtccactattgatgtttacttttatacctccaaccccttgtaaatactggggttggagagagtttatacgcaaacgcaatctggtcatccagctcggacaggaaaccttctgtccgtcacagtactgcgtcagaatcggctgcttcacattaggtctcgacagatagttttcaaacatttcatttactatcagcgagatattatcatatatatttctgccatagatgaatttgtggtcatatg

SEQ ID NO: 32029 - DNA, 260 bp, Unknown
  Description of Unknown: RightRegion for integrase B6030 sequence
aaaacgtaccgcctaaacaaaggcggcacgttgtcggatttcgcttccaatgcaccctgacggcgcaggcgaaaacacggaactgaccgtagcggacgcagtgcgtgcactgctgctgtggacgggcatgaccgagcagcagctcggctcgttcccggatgactatctggctcaggcccgcagcatgggcatgatcgacacggacaccgacgccgacgcgccctgcacgctcgcggcttaccgccagatgaaggcggtcg

SEQ ID NO: 32030 - DNA, 109 bp, Unknown; identical to SEQ ID NO: 32020
  Description of Unknown: RightRegion for integrase B6031 sequence

SEQ ID NO: 32031 - DNA, 204 bp, Unknown
  Description of Unknown: RightRegion for integrase B6032 sequence
gtgtttaataaaaaagaggccactattgatgtttacttttatacctccaaccccttgtaaatactggggttggagagagtttatacgcaaacgcaatctggtcatccagctcggacaggaaaccttctgtccgtcacagtactgcgtcagaatcggctgcttcacattaggtctcgacagatagttttcaaacatttcatttac

SEQ ID NO: 32032 - DNA, 109 bp, Unknown
  Description of Unknown: RightRegion for integrase B6033 sequence
gtgtttaataaaaaagaggccactattgatgtttacttttatacctccaaccccttgtaaatactggggttggagagagtttatacgcaaacgcaatctggtcatccag

SEQ ID NO: 32033 - DNA, 159 bp, Unknown
  Description of Unknown: RightRegion for integrase B6034 sequence
aaaacgtaccgcctaaacaaaggcggcacgttgtcggatttcgcttccaatgcaccatgaatgaaaaggagctagttgtcatggaggccacagccgaagggctcaagaaagccagagaaacggaggttccagaataagggcctctgtttttttgcgcca

SEQ ID NO: 32034 - DNA, 109 bp, Unknown; identical to SEQ ID NO: 32020
  Description of Unknown: RightRegion for integrase B6035 sequence

SEQ ID NO: 32035 - DNA, 109 bp, Unknown
  Description of Unknown: RightRegion for integrase B6036 sequence
gtgtttaataaaaaagaggccactattgatgtttacttttatacctcaaaccccttgtaaatactggggttggagagagtttatacgcaaacgcaatctggtcatccag

SEQ ID NO: 32036 - DNA, 260 bp, Unknown
  Description of Unknown: RightRegion for integrase B6037 sequence
gtgtttaataaaaaagagtccactattgatgtttacttttatacctccaaccccttgtaaatactggggttggagagagtttatacgcaaacgcaatctggtcatccagctcggacaggaaaccttctgtccgtcacaatactgcgtcagaatcggctgcttcacattaggtctcgacagatagttttcaaacatttcatttactatcagcgagatattgtcatatatatttctgccatagatgaatttgtggtcatatg

SEQ ID NO: 32037 - DNA, 260 bp, Unknown
  Description of Unknown: RightRegion for integrase B6038 sequence
tgcgggagccagcaacatgcgctatgtacaattatatatttcatcaaagaaatggcataaaaaaccgtagcctcgttaccatccagatagtgggggtctactgctttggtgaccttatctaggcaaaaaaaataacggcggtaacatgatagttaccgccgcttttgctaaattttctttacataatccaggcaaatccacccggctttcgacttcaggaatccccatttgttgcaagtatcgataatggtatagacacc

SEQ ID NO: 32038 - DNA, 178 bp, Unknown
  Description of Unknown: RightRegion for integrase B6039 sequence
cgccgcgacttcaactacggtcataagtacatcgtggatttcaaaatcaaattcaagtaacaaaataagcccggaggaaatatcctccgggctttcttacggtgcgagaagtcctttgtatcgccagcctatgtccagcggttgtcgatagaacggacttctcatatgcggttgttcc

SEQ ID NO: 32039 - DNA, 260 bp, Unknown
  Description of Unknown: RightRegion for integrase B6040 sequence
gtgtttaataaaaaagagtccactattgatgtttacttttatacctccaaccccttgtaaatactggggttggagagagtttatacgcaaacgcaatctggtcatccagctcggacaggagaccttctgtccatcacagtactgcgtcagaatcggctgcttcacattaggtcttgacaaatagttttcaaacatttcatttactatcagcgagatattgtcatatatatttctgccatagatgaatttgtggtcatatg

SEQ ID NO: 32040 - DNA, 260 bp, Unknown
  Description of Unknown: RightRegion for integrase B6041 sequence
gtttttaacaaaaaattacaaaatatcgacgtttacttctatacgctcaaacccttgtaaatactgggtttgagcatggtgagtacgcaaacgcaaaaaggtcaaccaccttgagaaactgccagttcaagtgctgttgattttcccatggatgtatcacctgctaaactataaattggattagcaattgccattccccatctgctattaataaatcccaaaacagtagcagatacccccatagctgaggctaattgcaa

SEQ ID NO: 32041 - DNA, 154 bp, Unknown
  Description of Unknown: RightRegion for integrase B6042 sequence
gtgtttaataaaaaagagtccactattgatgtttacttttatacctccaaccccttgtaaatactggggttggagagagtttatacgcaaacgcaatctggtcatccagctcggacaggagaccttctgtccgtcacagtactgcgtcagaatc

SEQ ID NO: 32042 - DNA, 260 bp, Unknown; identical to SEQ ID NO: 32024
  Description of Unknown: RightRegion for integrase B6043 sequence

SEQ ID NO: 32043 - DNA, 260 bp, Unknown
  Description of Unknown: RightRegion for integrase B6044 sequence
aaggaaagccagtttcctgttaaagtggatatttatctccggtccgatctctttgaataataaacacctgccaaagtcccctcaaggggactttttctttttctgaaatcttctttacttccacaatatggtatgaagttatcagattctgcctgtttttaacaaaaacgggacaaaaaccagaatcaaatagtatattttagaaaaaggagtcgatcaaaatgatcaaaagtttgttgtcaaggaaactgggagaattg

SEQ ID NO: 32044 - DNA, 109 bp, Unknown; identical to SEQ ID NO: 32020
  Description of Unknown: RightRegion for integrase B6045 sequence

SEQ ID NO: 32045 - DNA, 98 bp, Unknown
  Description of Unknown: RightRegion for integrase B6046 sequence
tcgtctgccatcctgcctatccccggcggttctgatgatgcactagtggtgacccagtagggattcgaaccctagacccacagcttagaaggctgttg

SEQ ID NO: 32046 - DNA, 193 bp, Unknown
  Description of Unknown: RightRegion for integrase B6047 sequence
gtgtttaataaaaaagagtccactattgatgtttacttttatacctcaaaccccttgtaaatactggggtttgagagagtttatacgcaaacgcaatctggtcatccagctcggacaggaaaccttctgtccgtcacaatactgcgtcagaatcggctgcttcacattaggtctcgacagatagttttcaaac

SEQ ID NO: 32047 - DNA, 260 bp, Unknown
  Description of Unknown: RightRegion for integrase B6048 sequence
ttaattgataaggtcgttgttctgaatactgatgttacgatctactggtcattctgctaagtacagactacagatggtctctacgttggcactccatgggaacatatcaacacagcaagccctttcaacccggtatccatatccttgcagcatctccaagtctctagccaggcttgtcggtttgcaggagatatataccattttctttaccctataagtcgcagcgatcttcttcagtgcttttggatggatgccatccc

SEQ ID NO: 32048 - DNA, 260 bp, Unknown
  Description of Unknown: RightRegion for integrase B6049 sequence
gtgtttaataaaaaagaggccactattgatgtttacttttatacctccaaccccttgtaaatactggggttggagagagtttatacgcaaacgcaatctggtcatccagctcggacaggaaaccttctgtccgtcacagtactgcgtcagaatcggctgcttcacattaggtctcgacagatagttttcaaacatttcatttactatcagcgagatattatcatatatatttctgccatagatgaatttgtggtcatatg

SEQ ID NO: 32049 - DNA, 260 bp, Unknown
  Description of Unknown: RightRegion for integrase B6050 sequence
  modified_base (41)..(50): a, c, t, g, unknown or other
gacaagcggcgggtggtggatttgatgattaccaccgttgnnnnnnnnnntatcctttgacgacaagcggcgggtggtggatttgatgattaccaccgttgccgctacaagcgacagcttgaacatcacatggaaaatctgatgggtggaacccctcccgtcagatacctaccctgtgtagtcccttgtaaactgtactttctttctgctataatatttaaagaaaaataacaaaaagggagatggaaatatatgatttg

SEQ ID NO: 32050 - DNA, 260 bp, Unknown
  Description of Unknown: RightRegion for integrase B6051 sequence
gtgtttaataaaaaagagtccactattgatgtttacttttatacctccaaccctttgtaaatactggggttggagagagtttatacgcaaacgcaatctggtcatccagctaggacaggagaccttctgtccgtcacagtactgcgtcagaatcggctgcttcacattaggtctcgacagatagttttcaaacatttcatttactatcagcgagatattgtcatatatatttctgccatagatgaatttgtggtcatatg

SEQ ID NO: 32051 - DNA, 100 bp, Unknown
  Description of Unknown: RightRegion for integrase B6052 sequence
atcttacagaatcctgtaaaggtggagagttcgtacctcaatcaaatggtgacccggtagggattcgaaccctagacctactgattcgtagtcagtcact

SEQ ID NO: 32052 - DNA, 260 bp, Unknown
  Description of Unknown: RightRegion for integrase B6053 sequence
agaacgctgagagaggaagacttgcatgctgcggtcctcacagcgattaacgatgcctagtctagaaaagcggatatcataccagctctgaaggagaatatcaaagccgttcttgatggcggagttgcggatgccatcgcagaaatcgacgagaagataaaggagaagcagaaggaactcctcgaagccggacatgatgatgccttgattgatagcattggcgcagagatcatcgacctcagagaagaacatcaggattt

SEQ ID NO: 32053 - DNA, 176 bp, Unknown
  Description of Unknown: RightRegion for integrase B6054 sequence
gtgtttaataaaaaagagtccactattgatgtttacttttatacctccaaccccttgtaaatactggggttggagagagtttatacgcaaacgcaatttggtcatccagctcggacaggagaccttctgtccgtcacagtactgcgtcagaatcggctgcttcacattaggtctcg

SEQ ID NO: 32054 - DNA, 260 bp, Unknown
  Description of Unknown: RightRegion for integrase B6055 sequence
atgtactacgaaaaaggctgtacatccgaagatatacagcttgaaattttactaaaataagtaggtatcatacggcagtctattcataggcatctagatgatacctccttccttttatgtaaatttaaggattcatctttccatactatgcgtattataacataaacggaaatatagataatactcatatgacatttgatgttataactaattaaaagagccgctaaaaatggctctatatccttattttgatgttaggg

SEQ ID NO: 32055 - DNA, 260 bp, Unknown
  Description of Unknown: RightRegion for integrase B6056 sequence
aatacggcggggtggttagaccgccgattggatagattaagtaaggagggcaaacaatgagcatacctcaaaggatagtgcaagagagaccagttatatacagaccgacaaacacggcaagcagcattcacaaggagaacgtaacctactatgctcgtgtaagtacccaaaacgatgaacaggaagactcatacgaaagacaaaaggctcacttcgaagagaagatccactcaaacccgaattggaactatgtcgaagga

SEQ ID NO: 32056 - DNA, 109 bp, Unknown; identical to SEQ ID NO: 32020
  Description of Unknown: RightRegion for integrase B6057 sequence

SEQ ID NO: 32057 - DNA, 260 bp, Unknown
  Description of Unknown: RightRegion for integrase B6058 sequence
aaccaaaaaggttggaaagaaaagattaaaggaggcttaagagcaaaatggaaacgataatcaataatcaacccaaagtggtgagggttgtaaggaaggtatcgtccacgcagataaccgcacaaactatacgggagcagttgacagatacgcgattgcccgttgcggcctatgcaagagtctcaactacaaacgaagagcaggaagacagtcttgaaagacaaagagcgcattacaccgaatatataggaaatcgtccc

SEQ ID NO: 32058 - DNA, 115 bp, Unknown
  Description of Unknown: RightRegion for integrase B6059 sequence
gccattaaagaaattagaattgataatgaccagaatatcacgggtgttgtttttgggtagtgttgtactaatgtgacactacccgtgggttcatctgccagaaggatatggggat

SEQ ID NO: 32059 - DNA, 109 bp, Unknown; identical to SEQ ID NO: 32020
  Description of Unknown: RightRegion for integrase B6060 sequence

SEQ ID NO: 32060 - DNA, 260 bp, Unknown
  Description of Unknown: RightRegion for integrase B6061 sequence
gatgatgtatcagataattcgttcgcctgctgcaaggaatggggagccaatcacgcataatccgaacactttcgtcactaagaatgtgttcggatttgttgtttatttttgatattgaaaccgtccgaatttttataagttcgggcggtttttgttatcataaagtaaaattcgcattaggtttgagtgctgattataaggtcaagatagaatttatgcaaattgttatctttgtataaatcgtgccataagatatactt

SEQ ID NO: 32061 - DNA, 260 bp, Unknown
  Description of Unknown: RightRegion for integrase B6062 sequence
cgccgcgacttcaactacggtcataagtacatcgtggatttcaaaatcaaattcaagtaacaaaaataagcccggaggaaatttcctccgggcttatttgcggtgcgagaagtcctttgcatcgccagcctatgtccaacggctgccgcaggacctcaagcgtcgccttcgagaattccggcagctcgtcgaggaacaagacaccgtgatgcgcgagcgtgacctcgccgggacgcggcacactgccgccgccgatcatc

SEQ ID NO: 32062 - DNA, 109 bp, Unknown; identical to SEQ ID NO: 32032
  Description of Unknown: RightRegion for integrase B6063 sequence

SEQ ID NO: 32063 - DNA, 109 bp, Unknown; identical to SEQ ID NO: 32032
  Description of Unknown: RightRegion for integrase B6064 sequence

SEQ ID NO: 32064 - DNA, 78 bp, Unknown
  Description of Unknown: RightRegion for integrase B6065 sequence
tgtggtagcccgtaccagattcgaactggtgatctccgccttgagagggcggcgtcctaaaccgctagacgaacgggc

SEQ ID NO: 32065 - DNA, 139 bp, Unknown
  Description of Unknown: RightRegion for integrase B6066 sequence
gtcattaaagaaattagaattgataatgaccagaatatcacgggtgttgtttttgggtagtgttgtactaatgtgacactacccgtgggcagtgttaagttagtacaaatataaaaaggctacacactgactgtgtacc

SEQ ID NO: 32066 - DNA, 109 bp, Unknown
  Description of Unknown: RightRegion for integrase B6067 sequence
attgtttacgatcgggaatccgatactctgaaaattcatttctttttataccactcataatgccggaaacccgcgtatttacgggatttccggctactttataggttgt

SEQ ID NO: 32067 - DNA, 109 bp, Unknown
  Description of Unknown: RightRegion for integrase B6068 sequence
aaaattatctacaaccgagaacaagattctctgaaaatctattatttcttatatcagtaaaatacccgcaaacacctgtaaaataagggcttgcgggttctttatacgt

SEQ ID NO: 32068 - DNA, 260 bp, Unknown
  Description of Unknown: RightRegion for integrase B6069 sequence
attgtttacgatcgggaatccgatactctgaaaattcatttctttttataccactcataatgccggaaaccctcgtatttacgggctttccggctactttataggttgtgacaatttggtcatccagttcggacactgaacctgtcttccgtcacagtattgtgtcagaatcggctgccttacattcggtctggaaagataatctgcaaacagttcgtccaccactgtagaaatggagtcaaaaacatttcgttccggaa

SEQ ID NO: 32069 - DNA, 260 bp, Unknown
  Description of Unknown: RightRegion for integrase B6070 sequence
attgtttacgatcgggaatccgatactctgaaaattcatttctttttataccactcataatgccggaaacccacgtatttacgggctttccggctactttataggttgtggcaatttggtcaaccattttgccacaaccgataaagttatttcttcttattttaagggaattgtaagtcctcatgtttggtgctgtcaaccgtgatttatttcacccgcagtctctgaccaacatagatcacattcggattgctgattcc

SEQ ID NO: 32070 - DNA, 109 bp, Unknown
  Description of Unknown: RightRegion for integrase B6071 sequence
aaaattgtctacgaccgagaacaagattctctgaaaatctattatttcttatatcagtaaaatgcccgcaaaccactgtaaaataagggtttgcgggttctttatacgt

SEQ ID NO: 32071 - DNA, 109 bp, Unknown
  Description of Unknown: RightRegion for integrase B6072 sequence
attgtttacgatcgggaatccgatactctgaaaattcatttctttttataccactcataatgccgggaacccacgtatttacgggctttccggctactttataggttgt

SEQ ID NO: 32072 - DNA, 109 bp, Unknown
  Description of Unknown: RightRegion for integrase B6073 sequence
attgtttacgatcgggaatccgatactctgaaaattcatttctttttataccactcataatgccggaaacccacgtatttacaggctttccggctactttataggttgt

SEQ ID NO: 32073 - DNA, 260 bp, Unknown
  Description of Unknown: RightRegion for integrase B6074 sequence
attgtttacgatcgggaatccgatactctgaaaattcatttctttttataccactcataatgccggaaacccacgtatttacaggctttccggctactttataggttgtgacaatttggtcatccagttcggacactgaacctgtcttccgtcacagtattgtgtcagaatcggctgccttacattcggtctggaaagataatctgcaaacagttcgtccaccactgtagaaatggagtcaaaaacatttcgttccggaa

SEQ ID NO: 32074 - DNA, 109 bp, Unknown
  Description of Unknown: RightRegion for integrase B6075 sequence
aaaattgtctacgaccgagaacaagattctctgaaaatctattatttcttatatcagtaaaatacccgcaaaccactgtaaaataagggcttgcgggttctttatacgt

SEQ ID NO: 32075 - DNA, 109 bp, Unknown
  Description of Unknown: RightRegion for integrase B6076 sequence
attgtttacgatcgggaatccgatactctgaaaattcatttctttttataccactcataatgccggaaacccgcgtatttacaggctttccggctactttataggttgt

SEQ ID NO: 32076 - DNA, 109 bp, Unknown
  Description of Unknown: RightRegion for integrase B6077 sequence
attgtttacgatcgggaatccgatactctgaaaattcatttctttttataccactcataatgccggaaacccacgtatttacgggctttccggctactttataggttgt

SEQ ID NO: 32077 - DNA, 109 bp, Unknown; identical to SEQ ID NO: 32075
  Description of Unknown: RightRegion for integrase B6078 sequence

SEQ ID NO: 32078 - DNA, 260 bp, Unknown
  Description of Unknown: RightRegion for integrase B6079 sequence
agaccgcaacatatttttcccacgatacttttcaaatttttatatttttttcaaagatagaaaaaaacagccgcctcagattgttccgatgatgtttgacaagcaaaatccaaaaaactgacaagcaaaacgcaaaaaagtgatgaaatgtttcaacaaaacgaaacactcatcactttttttgaattatcgagaatttttgaaacgtattttttacagctctaaaatgtcatttaaatcgcattttaaaaatctgcaaa

SEQ ID NO: 32079 - DNA, 260 bp, Unknown
  Description of Unknown: RightRegion for integrase B6080 sequence
cgaacgatgatgacggtcgtgaacggggccgtttacctcatgcttcagcgcgcggcctagcgcaccctgagcttctgaccggcgttgatcttgttaggatcactgattccgttcatctgggcaagcttggtgtaggtagtgccgtatttctgggcgatgccggaaagcgtgtctccgggcttaactgtgtagtacacggcagaagatgcaccgagcttcttgttgacctcggtctgaacggcgtctgcatcgtagccagc

SEQ ID NO: 32080 - DNA, 109 bp, Unknown
  Description of Unknown: RightRegion for integrase B6081 sequence
attgtttacgatcgggaatccgatactctgaaaattcatttctttttatatcactcataatgccggaaacccgcgtatttacgggctttccggctactttataggttgt

SEQ ID NO: 32081 - DNA, 260 bp, Unknown
  Description of Unknown: RightRegion for integrase B6082 sequence
attatttacgatcgggaatccgatactctgaaaattcatttctttttataccactcataatgccggaaacccacgtatttacgggctttccggctactttataggttgtgacaatttggtcatccagttcggacactgaacctgtcttccgtcacagtattgtgtcagaatcggctgccttacattcggtctggaaagataatctgcaaacagttcgtccaccactgtagaaatggagtcaaaaacatttcgttccggaa

SEQ ID NO: 32082 - DNA, 109 bp, Unknown
  Description of Unknown: RightRegion for integrase B6083 sequence
attgtttacgatcgggaatccgatactctgaaaattcatttctttttataccactcataatgccggaaaccctcgtatttacgggctttccggctactttataggttgt

SEQ ID NO: 32083 - DNA, 260 bp, Unknown
  Description of Unknown: RightRegion for integrase B6084 sequence
cgaacgatgatgaccgtcgtgaacggggcggtctacctcatgatgccgcgagcggcctaaagaagctggttaacgcgcgcctgaaccgcatcgtacaaagaaccgagccgacgcttgcgctcctcgccgttgccgtagtcgccacgaataacggcgcgggcaagcgcgtcgatgtcggcacctccggacgagccgccgtcagcgccaagaagctcgttgacgcgcgcctgaaccgcgtcgtagttggagccgagcgcggc

SEQ ID NO: 32084 - DNA, 122 bp, Unknown
  Description of Unknown: RightRegion for integrase B6085 sequence
attgtttacgatcgggaatccgatactctgaaaattcatttctttttataccactcataatgccggaaacccacgtatttacaggctttccggctactttataggttgtgacaatttggtca

SEQ ID NO: 32085 - DNA, 260 bp, Unknown
  Description of Unknown: RightRegion for integrase B6086 sequence
cgaaccgaggtgtgcgcagtcggcacgatcatcttcgttaggataccacgagcggcctaggaaacaaccaggcgcatgccgggatagatcagattcgggtttgagatgccgttcttggcggcgagatcctgataggtcgtgccgtactttgaggcgattccagaaagggtgtcgccgctctgcaccacgtacacctgctcggtctcggcctggtcgttgattaccgccataacctcgtcgtagcgcggccccaaaacagc

SEQ ID NO: 32086 - DNA, 109 bp, Unknown; identical to SEQ ID NO: 32020
  Description of Unknown: RightRegion for integrase B6087 sequence

SEQ ID NO: 32087 - DNA, 260 bp, Unknown
  Description of Unknown: RightRegion for integrase B6088 sequence
aaaattatctacgaccgagaacaagattctctgaaaatctattatttcttatatcagtaaaatacccgcaaaccactgtaaaataagggtttgcgggttctttatacgttgtagcaaaaaggttgacacagtggggctcaaagaccttaggtgatcaaggctatactcccatccaaattctgcgttactactacggtgatgacatgtatattaacactgccagtgcaatttccggtattccatcgtcctggccgggttac

SEQ ID NO: 32088 - DNA, 145 bp, Unknown
  Description of Unknown: RightRegion for integrase B6089 sequence
accaattctcctatggtggaggcgcggagaatcgaactccggtccacgaaagccccctgattggcatctccaagctcagtcgctggttttgtctcggacgctttgcgcgcagcgacacgctcgcggcgtcctaaccggttcggtc

SEQ ID NO: 32089 - DNA, 109 bp, Unknown; identical to SEQ ID NO: 32076
  Description of Unknown: RightRegion for integrase B6090 sequence

SEQ ID NO: 32090 - DNA, 260 bp, Unknown
  Description of Unknown: RightRegion for integrase B6091 sequence
agaccgcaacatatttttcccacgatacttttcaaatttttatacttttttcaaagatagaaaaaaatcagccgaaatgataaatatatgacacgaaatttgcacacgctaaaattttgctctgaaaatatgtacaaaaagcaagtctatatttgtgcaatcctacaaaattcaatgttatctatatttttgttatctaactgcttgactttttctagataacatggtatactataatcacagacaagagatgagacttg

SEQ ID NO: 32091 - DNA, 260 bp, Unknown
  Description of Unknown: RightRegion for integrase B6092 sequence
attgtttacgatcgggaatccgatactctgaaaattcatttctttttataccactcataatgccggaaacccacgtatttacaggctttccggctactttataggttgtgacaatttggtcatccagttcggacactgaacctgtcttccgtcacagtattgtgtcagaatcgactgccttacattcggtctggaaagataatctgcaaacagttcgtccaccactgtagaaatggagtcaaaaacatttcgttccggaa

SEQ ID NO: 32092 - DNA, 260 bp, Unknown
  Description of Unknown: RightRegion for integrase B6093 sequence
tggtggagccgaggggaatcgaaccccataaataaatttaaaaaactgttgcggcactagcaatttttattttttatttccaattccgttgccaatttgcgttttttcatcgcttcggcggtgaagtagtcgcagaagtcgctggagcgtttggcaatatctttctgggcgaggtgcgtgtagatattgtgcatggtggacaagtcgctccacccgccgatttcggcggcgatcatttccggaatctgcaagtggtaggc

SEQ ID NO: 32093 - DNA, 260 bp, Unknown
  Description of Unknown: RightRegion for integrase B6094 sequence
gtgtttaataaaaaagagtccactattgatgtttacttttatacctccaaccccttgtaaatactggggttggagagagtttatacgcaaacgcaatctggtcatccagctcggacaggagaccttctgtccgtcacagtactgcgtcagaatcggctgcttcacattaggtctcgacagatagttttcaaacatttcatttactatcagcgagatattgtcatatatatttctgccatagatgaatttgtggtcatatg

SEQ ID NO: 32094 - DNA, 260 bp, Unknown
  Description of Unknown: RightRegion for integrase B6095 sequence
attgtttacgatcgggaatccgatactctgaaaattcatttctttttatatcactcataatgccggaaacccgcgtatttacaggctttccggctactttataggttgtgacaatttggtcaaccattttgccacaaccgataaagttatttcttcttattttaaaggaatgccatttgtggcactatctaaactgaatcgcctcaatctgcaatgcctgtccgactgtacctagtgtagatacaccgtcagctttcgtc

SEQ ID NO: 32095 - DNA, 109 bp, Unknown; identical to SEQ ID NO: 32082
  Description of Unknown: RightRegion for integrase B6096 sequence

SEQ ID NO: 32096 - DNA, 260 bp, Unknown
  Description of Unknown: RightRegion for integrase B6097 sequence
attgtttacgatcgggaatccgatactctgaaaattcatttctttttataccactcataatgccggaaacccgcgtatttacgggctttccggctactttataggttgtgacaatttggtcatccagttcggacactgaacctgtcttccgtcacagtattgtgtcagaatcggctgccttacattcggtctggaaagataatctgcaaacagttcgtccaccactgtagaaatggagtcaaaaacatttcgttccggaa

SEQ ID NO: 32097 - DNA, 109 bp, Unknown
  Description of Unknown: RightRegion for integrase B6098 sequence
attgtttacgatcgggaatccgatactctgaaaattcatttctttttataccactcataatgccagaagcccacgtatttacgggctttccggctactttataggttgt

SEQ ID NO: 32098 - DNA, 260 bp, Unknown
  Description of Unknown: RightRegion for integrase B6099 sequence
aaaaaaaagaagaccgctccatcagacttccagttgactatcgacctgaaatacaactagaccccgcaaaccattgcagggcctaacattttctcgactttaaaagtgctaagtcttccgagaaagaattagcactttataatctaaatatcctcatgttttaagtacgcaggcaacgtagacatctcactcgttgtcctgcacatactccatcaaaatccactacatattacctccctcaattttcagaaatagcaaat

SEQ ID NO: 32099 - DNA, 260 bp, Unknown
  Description of Unknown: RightRegion for integrase B6100 sequence
attgtttacgatcgggaatccgatactctgaaaattcatttctttttataccactcataatgccggaaacccacgtatttacgggctttccggctactttatcggttgtggcaatttggtcatccagttcggacactgaacctgtcttccgtcacagtattgtgtcagaatcggctgccttacattcggtctggaaagataatctgcaaacagttcgtccaccactgtagaaatggagtcaaaaacatttcgttccggaa

SEQ ID NO: 32100 - DNA, 260 bp, Unknown
  Description of Unknown: RightRegion for integrase B6101 sequence
gtgttagtaaaggaagttatcgtagaagggaaagagaaaataaacattaactacttctagctaggtaatgacataagtatttcgttttcaatacaacgagctgcataagttgcaagttttgttcctttatcagtggaataactttcaactcctttaatcaaaccaattgtgccaattgaaataaggtcttctgcatcttctcctgtattttcaaactttttaacaatatgtgccactaatcggagattatgttcgattag

SEQ ID NO: 32101 - DNA, 260 bp, Unknown
  Description of Unknown: RightRegion for integrase B6102 sequence
attgtttacgatcgggaatccgatactctgaaaattcatttctttttataccactcataataccggaaacccgcgtatttacgggctttccggctactttataggttgtggcaatttggtcatccagttcggacactgaacctgtcttccgtcacagtattgtgtcagaatcggctgccttacattcggtctggaaagataatctgcaaacagttcgtccaccactgtagaaatggagtcaaaaacatttcgttccggaa

SEQ ID NO: 32102 - DNA, 109 bp, Unknown
  Description of Unknown: RightRegion for integrase B6103 sequence
aaaattgtctacaaccgagaacaagattctctgaaaatctattatttcttatatcagtaaaatacccgcaaaccactgtaaaataagggcttgcgggttctttatacgt

SEQ ID NO: 32103 - DNA, 260 bp, Unknown
  Description of Unknown: RightRegion for integrase B6104 sequence
aaaattgtctacgaccgagaacaagattctctgaaaatctattatttcttatatcagtaaaatacccgcaaaccactgtaaataagggtttgcgggttctttatacgttgtagcaaaaaggttgacacagtggggttcaaagaccttaggtgatcaaggctatactcccatccaaattctgcgttactactacggtgatgacatgtatattaacactgccagtgcaatttccggtattccatcgtcctggccgggttacg

SEQ ID NO: 32104 - DNA, 109 bp, Unknown
  Description of Unknown: RightRegion for integrase B6105 sequence
accaattctcttatggtggaggcacggagaatcgaactccggtccacgaaagttccctgatcggcatctccaggctcagtcactcatttagtctcggacgcgttgcgcg

SEQ ID NO: 32105 - DNA, 109 bp, Unknown; identical to SEQ ID NO: 32076
  Description of Unknown: RightRegion for integrase B6106 sequence

SEQ ID NO: 32106 - DNA, 260 bp, Unknown
  Description of Unknown: RightRegion for integrase B6107 sequence
agaccgcaacatatttttcccacgatacttttcaaatttttatacttttttcaaagatagaaaaaaatcagccgcctcagatcactccgaggcggctgaaatactatctgatatactttctccgaccgcaacgtatcttctgtacgatacgttgtgcgtgtctccaatctttttccgatatcaacggctcatagtcgccctgatataaatgccccttaaagctataatagccgatgtaaacaggtcgtgttactattttc

SEQ ID NO: 32107 - DNA, 109 bp, Unknown; identical to SEQ ID NO: 32076
  Description of Unknown: RightRegion for integrase B6108 sequence

SEQ ID NO: 32108 - DNA, 260 bp, Unknown
  Description of Unknown: RightRegion for integrase B6109 sequence
attgtttacgatcgggaatccgatactctgaaaattcatttctttttataccactcataatgccggaaacccgcgtatttacgggatttccggctactttataggttgtgacaatttggtcaaccattttgccacaacctataaagttatttcttcttattttaagggaattataagtcctcatgtttggcgctgtcaaccgtgatttatttcacccgcagtctctgaccaacatagatcacattcggattgctgattcc

SEQ ID NO: 32109 - DNA, 109 bp, Unknown
  Description of Unknown: RightRegion for integrase B6110 sequence
aaaattgtctacgagcgagaacaagattctctgaaaatctattatttcttatatctgtaaaatacccgcaaaccactgtaaaataagggcttgcgggttctttatacgt

SEQ ID NO: 32110 - DNA, 109 bp, Unknown
  Description of Unknown: RightRegion for integrase B6111 sequence
attgtttacgatcgggaatccgatactctgaaaattcatttctttttatatcactcataatgccggaaacccacgtatttacgggctttccggctactttataggttgt

SEQ ID NO: 32111 - DNA, 171 bp, Unknown
  Description of Unknown: RightRegion for integrase B6112 sequence
attgtttacgatcgggaatccgatactctgaaaattcatttctttttataccactcataatgccggaaacccacgtatttacaggctttccggctactttataggttgtggcaatttggtcatccagttcggacactgaacctgtcttccgtcacagtattgtgtcagaat

SEQ ID NO: 32112 - DNA, 260 bp, Unknown
  Description of Unknown: RightRegion for integrase B6113 sequence
attgtttacgatcgggaatccgatactctgaaaattcatttctttttatatcactcataatgccggaaacccacgtatttacaggctttccggctactttataggttgtgacaatttggtcaaccattttgccacaacctataaagttatttcttcttattttaagggaattataagtcctcatgtttggtactgtcaaccgcgatttatttcacccgcaatctctgaccaacatagatcacattcggattgctgattcc

SEQ ID NO: 32113 - DNA, 260 bp, Unknown
  Description of Unknown: RightRegion for integrase B6114 sequence
attgtttacgatcgggaatccgatactctgaaaattcatttctttttataccactcataatgccggaaacccgcgtatttacgggctttccggctactttataggttgtgacaatttggtcatccagttcggacactgaacctgtcttccgtcacagtattgtgtcagaatcggctgccttacattcggtctggaaagataatctgcaaacagttcgtccaccactgtagaaatggagtcaaaaacattccgttccggaa

SEQ ID NO: 32114 - DNA, 260 bp, Unknown
  Description of Unknown: RightRegion for integrase B6115 sequence
aaaattgtctacgaccgagaacaagattctctgaaaatctattatttcttatatcagtaaaatacccgcaaaccactgtaaaataagggtttgcgggttctttatacgttgtagcaaaaaggttgacacagtggggctcaaagaccttaggtgatcaaggctatactcccatccaaattctgcgttactactacggtgatgacatgtatattaacactgccagtgcaatttccggtattccatcgtcctggccgggttac

SEQ ID NO: 32115 - DNA, 258 bp, Unknown
  Description of Unknown: RightRegion for integrase B6116 sequence
accaattcttgcatggtggaggtgcggagaatcgaactccggtccaaagcaagcccctgacaggtgtctccaggctcagtggccggttgggtctcggacgccgcgcacccggtcacccgcgcttggcgtcccagccggttcggcctttgcgcgcggcataccgactacgtccgcgcgcgcatctccctgagatgacgtcgccccgggaacgggagcaatccccggtttgacgcgccgctatctaattaagcagcgaga

SEQ ID NO: 32116 - DNA, 109 bp, Unknown
  Description of Unknown: RightRegion for integrase B6117 sequence
aaaattgtctacaaccgagaacaagattctctgaaaatctattatttcttatatcagtaaaatacccgcaaaccactgtaaaataagggtttgcgggttctttatacgt

SEQ ID NO: 32117 - DNA, 260 bp, Unknown; identical to SEQ ID NO: 32096
  Description of Unknown: RightRegion for integrase B6118 sequence

SEQ ID NO: 32118 - DNA, 109 bp, Unknown; identical to SEQ ID NO: 32076
  Description of Unknown: RightRegion for integrase B6119 sequence

SEQ ID NO: 32119 - DNA, 109 bp, Unknown; identical to SEQ ID NO: 32076
  Description of Unknown: RightRegion for integrase B6120 sequence

SEQ ID NO: 32120 - DNA, 260 bp, Unknown
  Description of Unknown: RightRegion for integrase B6121 sequence
aaaattatctacgaccgagaacaagattctctgaaaatctattatttcttatatcagtaaaatacccgcaaaccactgtaaaataagggcttgcgggttctttatacgttgtagcaaaaaggttgacacagtggggctcaaagaccttaggtgatcaaggctatactcccatccaaattctgcgttactactacggtgatgacatgtatattaacactgccagtgcaatttccggtattccatcgtcctggccgggttac

SEQ ID NO: 32121 - DNA, 260 bp, Unknown
  Description of Unknown: RightRegion for integrase B6122 sequence
attgtttacgatcgggaatccgatactctgaaaattcatttctttttataccactcataatgccgggaacccacgtatttacgggctttccggctactttataggttgtggcaatttggtcatccagttcggacactgaacctgtcttccgtcacagtattgtgtcagaatcggctgccttacattcggtctggaaagataatctgcaaacagttcgtccaccactgtagaaatggagtcaaaaacatttcgttccggaa

SEQ ID NO: 32122 - DNA, 260 bp, Unknown
  Description of Unknown: RightRegion for integrase B6123 sequence
attgtttacgatcgggaatccgatactctgaaaattcatttctttttataccactcataatgccggaaacccacgtatttacgggctttccggctactttataggttgtgacaatttggtcatccagttcggacactgaacctgtcttccgtcacagtattgtgtcagaatcggctgccttacattcggtctggaaagataatctgcaaacagttcgtccaccactgtagaaatggagtcaaaaacatttcgttccggaa

SEQ ID NO: 32123 - DNA, 260 bp, Unknown
  Description of Unknown: RightRegion for integrase B6124 sequence
attgtttacgatcgggaatccgatactctgaaaattcatttctttttataccactcataatgccggaaaccctcgtatttacgggctttccggctactttataggttgtaacaatttggtcatccattttgccacaaccgataaagttatttcttcttattttaagggaattgtaagtcctcatgtttggtgctgtcaaccgtgatttatttcacccgcagtctctgaccaacatagatcacattcggattgctgattcc

SEQ ID NO: 32124 - DNA, 109 bp, Unknown
  Description of Unknown: RightRegion for integrase B6125 sequence
attgtttacgatcgggaatccgatactctgaaaattcatttctttttataccactcataatgccggaaacccacgtatttacgggctttccagctactttataggttgt

SEQ ID NO: 32125 - DNA, 109 bp, Unknown
  Description of Unknown: RightRegion for integrase B6126 sequence
gtgtttaataaaaaagagtccactattgatgtttacttttatacctccaaccccttgtaaatactggggttggagagagtttatacgcaaatgcaatctggtcatccag

SEQ ID NO: 32126 - DNA, 260 bp, Unknown
  Description of Unknown: RightRegion for integrase B6127 sequence
atatttaacaaactgatttacaacccatttgacgatagtattgacatagaatttacatagtatcggttatgtattcaaaggacagcctctgcttccttcgtaataaactattttattgcttaaatcctcctcttcctcataaggaaatacaatctcatccatagacattagtggtctacttgcattcgatagaaccttattatttactttataatgtaatcctcttatatcctctatttctcttaatccaagcttatatt

SEQ ID NO: 32127 - DNA, 109 bp, Unknown
  Description of Unknown: RightRegion for integrase B6128 sequence
aaaattatctacgaccgagaacaagattctctgaaaatctattatttcttatatcagtaaaatacccgcaaacacctgtaaaataagggcttgcgggttctttatatgt

SEQ ID NO: 32128 - DNA, 260 bp, Unknown
  Description of Unknown: RightRegion for integrase B6129 sequence
attgtttacgatcgggaatccgatactctgaaaattcatttctttttataccactcataatgccggaaacccgcgtatttacgggatttccggctactttataggttgtgacaatttggtcatccagttcggacactgaacctgtcttccgtcacagtattgtgtcagaatcggctgccttacattcggtctggaaagataatctgcaaacagttcgtccaccactgtagaaatggagtcaaaaacattccgttccggaa

SEQ ID NO: 32129 - DNA, 109 bp, Unknown; identical to SEQ ID NO: 32076
  Description of Unknown: RightRegion for integrase B6130 sequence

SEQ ID NO: 32130 - DNA, 109 bp, Unknown
  Description of Unknown: RightRegion for integrase B6131 sequence
attatttacgatcgggaatccgatactctgaaaattcatttctttttataccactcataatgccggaaacccacgtatttacaggctttccggctactttataggttgt

SEQ ID NO: 32131 - DNA, 260 bp, Unknown
  Description of Unknown: RightRegion for integrase B6132 sequence
aaaattgtctacaaccgagaacaagattctctgaaaatctattatttcttatatcagtaaaatacccgcaaaccactgtaaataagggtttgcgggttctttatacgttatagcaaaaaggttgaccattttgtcaggacgtataaagtaaatttcttcctattataatgggaatttacacataaaataaggaggcatttcagccccctagtattcattattcagttttaatttggtgtagatctacgatggcctccaac

SEQ ID NO: 32132 - DNA, 260 bp, Unknown
  Description of Unknown: RightRegion for integrase B6133 sequence
cgaacgatgatggccgtcctgaacggggccgtctacctgcgcttcagccgcgcggcctagctcgcgggcttcatgacgccagcggtgaccatggcgtcgcgcagggagatgaactcggccttggtcggcgtgtcaccggcggggtcggccacgtagtcggcctgcgtgacctcgctctcggggagcccctcgatgtagaggctcacctcctgagcgcccttctgcttggtcggggtgtacttggcgttgatcgtctgcat

SEQ ID NO: 32133 - DNA, 109 bp, Unknown; identical to SEQ ID NO: 32074
  Description of Unknown: RightRegion for integrase B6134 sequence

SEQ ID NO: 32134 - DNA, 260 bp, Unknown
  Description of Unknown: RightRegion for integrase B6135 sequence
attgtttacgatcgggaatccgatactctgaaaattcatttctttttataccactcataatgccggaaacccgcgtatttacgggctttccggctactttataggttgtggcaatttggtcatccagttcggacactgaacctgtcttccgtcacagtattgtgtcagaatcggctgccttacattcggtctggaaagataatctgcaaacagttcgtccaccactgtagaaatggagtcaaaaacatttcgttccggaa

SEQ ID NO: 32135 - DNA, 109 bp, Unknown
  Description of Unknown: RightRegion for integrase B6136 sequence
gtgtttgacaagaaaaatgacagacttgacgtctactactaccttgcgaaaacccagtaaatacaagggtttcaggaagttgtatgttgttacaaaaaggttgacacag

SEQ ID NO: 32136 - DNA, 109 bp, Unknown
  Description of Unknown: RightRegion for integrase B6137 sequence
aaaattgtctacgaccgagaacaagattctctgaaaatctattatttcttatatcagtaaaacacccgcaaaccactgtaaaataagggcttgcgggttctttatacgt

SEQ ID NO: 32137 - DNA, 260 bp, Unknown
  Description of Unknown: RightRegion for integrase B6138 sequence
gtttacgacaaagaaaatgacacactaaatgcttactattatctcgcaaaacctcagtaaaatcaaggatttgcagtggttgtatgttcttgcaattgggttgacacagtggggttctaaggcactcggcgaccaaggatactcacctattgaaattctgcgctactactacggtgacaatatgtacattaatactgctcaggaaatttccggcgtaccttcctcgtggcctggctataccctttccaatggttcttccg

SEQ ID NO: 32138 - DNA, 109 bp, Unknown
  Description of Unknown: RightRegion for integrase B6139 sequence
attgtttacgatcgggaatccgattctctgaaaattcatttctttttataccactcataatgccggaaacccgcgtatttacaggctttccggctactttataggttgt

SEQ ID NO: 32139 - DNA, 109 bp, Unknown
  Description of Unknown: RightRegion for integrase B6140 sequence
attgtttacgatcgggaatccgatactctgaaaattcatttctttttataccactcataatgccggaaaccaacgtatttacgggctttccggctactttataggttgt

SEQ ID NO: 32140 - DNA, 260 bp, Unknown
  Description of Unknown: RightRegion for integrase B6141 sequence
attgtttacgatcgggaatccgatactctgaaaattcatttctttttataccactcataatgccggaaaccctcgtatttacgggctttccggctactttataggttgtgacaatttggtcatccagttcggacactgaacctgtcttccgtcacagtattgtgtcagaatcggctgccttacattcggtctggaaagataatctgcaaacagttcgtccaccactgtagaaatggagtcaaaaacattccgttccggaa

SEQ ID NO: 32141 - DNA, 109 bp, Unknown; identical to SEQ ID NO: 32102
  Description of Unknown: RightRegion for integrase B6142 sequence

SEQ ID NO: 32142 - DNA, 109 bp, Unknown; identical to SEQ ID NO: 32076
  Description of Unknown: RightRegion for integrase B6143 sequence

SEQ ID NO: 32143 - DNA, 109 bp, Unknown
  Description of Unknown: RightRegion for integrase B6144 sequence
aaaattatctacgaccgagaacaagattctctgaaaatctattatttcttatatcagtaaaatacccgcaaaccactgtaaaataagggcttgcgggttctttatacgt

SEQ ID NO: 32144 - DNA, 260 bp, Unknown
  Description of Unknown: RightRegion for integrase B6145 sequence
aaaattgtctacgagcgagaacaagattctctgaaaatctattatttcttatatcagtaaaatacccgcaaccccctgtaaaataagggtttgcgggttctttatacgttgtagcaaaaaggttgacttaattgtctttattaaacctccagctctgccggatcgaccccctgtttcttcagcttcagatatacgacttcccggaacagtgcatatgccaccgacacgatcggtataaatatcaacattccgaccacgcc

SEQ ID NO: 32145 - DNA, 260 bp, Unknown
  Description of Unknown: RightRegion for integrase B6146 sequence
attgtttacgatcgggaatccgatactctgaaaattcatttctttttataccactcataatgccggaaacccacgtatttacgggctttccggctactttataggttgtgacaatttggtcatccagttcggacactgaacctgtcttccgtcacagtattgtgtcagaatcggctgccttacattcggtctggaaagataatctgcaaacagttcgtccaccactgtagaaatggagtcaaaaacattccgttccggaa

SEQ ID NO: 32146 - DNA, 260 bp, Unknown
  Description of Unknown: RightRegion for integrase B6147 sequence
gagaatatttacaaaatcatggtgaatttcgactgcgtttatatgatagaaacttgttaggtggcttataccgagaaaatccagtaaaatcaaggaattatgaagcggttaagagtagtaaaaagtgggaaaatgtaggtaattcatacattattcctgcactactcctataccgctattcctatatttgagcgtcaaatacaagtcattttattttttctatttcagttctgagccattcaaattctctggctgtatac

SEQ ID NO: 32147 - DNA, 109 bp, Unknown; identical to SEQ ID NO: 32136
  Description of Unknown: RightRegion for integrase B6148 sequence

SEQ ID NO: 32148 - DNA, 260 bp, Unknown
  Description of Unknown: RightRegion for integrase B6149 sequence
aaggaagccggaacgcttgactgcttcctgaatacttccatcgaaaagatttcaaaatagacaaagcccctgttttcggggctttgcgtcaccactaaacttgccgaatacggaccgccgtattgactgatgatcaccatcgccgccttcggatctgtcctggtaatatgaaccggatattccagtcttttttcataattaaacatatgacaaactccattctattttattaaatatgaaattaaaatgtcagaaacgcg

SEQ ID NO: 32149 - DNA, 115 bp, Unknown
  Description of Unknown: RightRegion for integrase B6150 sequence
atcatttatgacaaaccggcggattctcttaaaatttactactatctcacagagccgtaaaagcctatggttgacagctttttcgatggtttatctgttgtttccataaggatga

SEQ ID NO: 32150 - DNA, 260 bp, Unknown
  Description of Unknown: RightRegion for integrase B6151 sequence
gctactatttcggatttggacttatcaagtccaccattcgggccgtactcgaacacgtgagtgcgggcccttttctcggatattgtaaaatatcagcgcctcatcgttgcggagctcgactcgggcgatgaacgtgtcaaccaaccgagcgcggaagtcgtcatccgtgacgtctccgacgcggaaggagcgcagccaggcctcgaccacctcacgggtgagtcggggcctttttatttctgcccgctggatctccagca

SEQ ID NO: 32151 - DNA, 166 bp, Unknown
  Description of Unknown: RightRegion for integrase B6152 sequence
gaaaaaattgtatttaacaaggaaactgacactgcggagatatactattactacctgtaaatccctttgtttatgcggggtttgcggttttctatgttattacggtaaggttgaccttattgtaagaacatagaaataatgaagaagatgatacaatattaatccc

SEQ ID NO: 32152 - DNA, 260 bp, Unknown
  Description of Unknown: RightRegion for integrase B6153 sequence
cgcattgatattgatggggaggatataaccattcactggctgttcgctcctgaaaactaaaaaaaggcggggcttgcgccctgccttttcttattctttagccgttactgctgccgcctgggtcgcgtgacaaacaaacaatcacctccacgtgcttcgtccttggaaacagatccaccggctgcaccttttctgcatggtacccattcttctccagccatgcggcgtctcgggcggcggtggcggggttgcagctgaca

SEQ ID NO: 32153 - DNA, 260 bp, Unknown
  Description of Unknown: RightRegion for integrase B6154 sequence
cgcattgatattgatggggaggatataaccattcactggctgttcgctcctggaaactaaaaaaggcggggcttgcgccctgccttttctcattctttagccgttactgctgccgcctgggtcgcgtgacaaacaaacaatcgcctctacgtgccttgtccttgggaacaaatccacgggctgaaccttttccagcgtatatccctgttcacacaggaacttagcatcgcgggcggcggtggaggggttgcagctgacca

SEQ ID NO: 32154 - DNA, 260 bp, Unknown
  Description of Unknown: RightRegion for integrase B6155 sequence
atcatatttaaaaaactaaaatatgatccttataaagattctataaacatagagttttaatagtatcggttatgtgttaagaggacatccttttgatacataaatgatatagcacttattttttaagtgctatttttgtttcctctaatattttgcttatttctttatatgaatatccctttagtagtttatataattctttttttatctcatccatgagccattctcctttgtaaaaactttataaaaattatatcaaa

SEQ ID NO: 32155 - DNA, 260 bp, Unknown
  Description of Unknown: RightRegion for integrase B6156 sequence
aaggaagccggaacgcttgactgcttcctgaatacttccatcgaaaagatttcaaaatagacaaatccccgaaaacaggggctttgtgccacccctaaacttgccgaatacggaccgccgtactgactgatgatcaccatcgccgccttcggatctgtcctggtaatatgaaccggatattccagtcttttttcataattaaacatatgacaaactccattctattttattaaatatgaaattaaaatgtcagaaacgcg

SEQ ID NO: 32156 - DNA, 260 bp, Unknown
  Description of Unknown: RightRegion for integrase B6157 sequence
cgcattgatattgatggggaggatataaccattcactggctgttcgctcctggaaactaaaaaaggcggggcttgcgccctgccttttctcattctttagccgttactgctgccgcctgggtcgcgtgacaaacaaacaatcacctccacgtgccttgtccttgggaataaatccacgggctgaaccttttccagcgtatacccctgttcacacaggaacttagcatcgcgggcggcggtggaggggttgcagctgacca

SEQ ID NO: 32157 - DNA, 260 bp, Unknown
  Description of Unknown: RightRegion for integrase B6158 sequence
aaaagtatgatcgaccgagtggttttgagtgaagatggcgtggatgttcggttcaaataacacgcaggagatgtaaaatttagaaatgagctattccaaatctgagatatgaaatagctcattcatttattgatcttctctttgcaacaaaataatttttaaaagctctggatgtttttctaacaattcttgctggcgctttatttgtttttctctttcttcttccgtaataataataaatttataatcacgtttttcat

SEQ ID NO: 32158 - DNA, 260 bp, Unknown
  Description of Unknown: RightRegion for integrase B6159 sequence
atcatatttaaaaaactaaaatatgatccttataaagattctataaacatagagttttaatagtatcggttatgtgttaagaggacagccccttgatgcctcgtaatacactatcttattatctaaatcttcatccatcttatatgggaaaactatttcattcatactcataagaggtctattaccatttcctattacttcattgccttctttaaaatataatcctcttatacttctaatctctcttttcccaaggcaat

SEQ ID NO: 32159 - DNA, 77 bp, Unknown
  Description of Unknown: RightRegion for integrase B6160 sequence
aagggttcgtctaactttcatgtggtggagacgagggggatcgaacccctgacctcttgactgccagtcaagcgctc

SEQ ID NO: 32160 - DNA, 260 bp, Unknown
  Description of Unknown: RightRegion for integrase B6161 sequence
cgcattgatattgatggggaggatataaccattcactggctgttcgctcctgaaaactaaaaaaggcggggcttgcgccctgccttttcttattctttagccgttactgctgccgcctgggtcgcgtgacaaacaaacaatcacctcgaccattgtttcattttccaagggcaattctttcacttctgtcccattcactggaacggggaagttgaagataatcttcctgatccagttgccatccggctgcctttccggga

SEQ ID NO: 32161 - DNA, 260 bp, Unknown
  Description of Unknown: RightRegion for integrase B6162 sequence
cgcattgatattgatggggaggatataaccattcactggctgttcgctcctgaaaactaaaaaaggcggggcttgcgccctgccttttcttattctttagccgttactgctgccgcctgggtcgcgtgacaaacaaacaatcacctcaatatgtgtatcattgtccaaactcaaactcatatcttcctcaataatcggaagcttgaatttaatggatttgagccactgaccgttcggctgccgttcctcatagatatgga

SEQ ID NO: 32162 - DNA, 260 bp, Unknown
  Description of Unknown: RightRegion for integrase B6163 sequence
tacaataaagaggaagacaccctcgaagtgtattactactacaagccgcaaacccagtaaccatgcgggtttgcgtgtgtttgtacgtccttgcaaaaaggtcaaccagtttggacaactcaccctgcggccatcacaatactgtgtcaggattggctggcgcacattcggccgtgacagatagtctgcaaacagttcatccacaatcactgaaataggctcaaatatattgcgctccgggatccatttatggtcaaatg

SEQ ID NO: 32163 - DNA, 109 bp, Unknown; identical to SEQ ID NO: 32074
  Description of Unknown: RightRegion for integrase B6164 sequence

SEQ ID NO: 32164 - DNA, 109 bp, Unknown
  Description of Unknown: RightRegion for integrase B6165 sequence
aaggaagccggaacgcttgactgcttcctgaatacttccatcgaaaagatttcaaaatagacaaagcctcggttttcggggctttgtgtcgccactatacttgccgagt

SEQ ID NO: 32165 - DNA, 260 bp, Unknown
  Description of Unknown: RightRegion for integrase B6166 sequence
aaggaagccggaacgcttgactgcttcctgaatacttccatcgaaaagatttcaaaatagacaaagctccgaaaacaggggctttgtgccacccctaaacttgccgaatacggaccgccgtattgactgatgatcaccatcgccgccttcggatctgtcctggtaatatgaaccggatattccagtcttttttcataattaaacatatgacaaactccattctattttattaaatatgaaattaaaatgtcagaaacgcg

SEQ ID NO: 32166 - DNA, 260 bp, Unknown
  Description of Unknown: RightRegion for integrase B6167 sequence
cgcattgatattgatggggaagatataaccattcactggctgttcgctcctgaaaactaaaaaaggcggggcttgcgccctgccttttcttattctttagccgttactgctgccgcctgggtcgcgtgacaaacaaacaatcacctcgactattgtttcattttccaagggcaattctttcacttctgttccattcaccgggacagggaagttgaagataatcttcctaatccagttgccatccggctgcttttccggga

SEQ ID NO: 32167 - DNA, 260 bp, Unknown
  Description of Unknown: RightRegion for integrase B6168 sequence
cgcattgatattgatggggaggatataaccattcactggctgttcgctcctgaaaactaaaaaaggcggggcttgcgccctgccttttctcattctttagccgttactgctgccgcctgggtcgcgtgacaaacaaacaatcacctccacgtgccttgtccttgggaacaaatccacgggctgaaccttttccagcgtatacccctgttcacacaggaacttagcatcgcgggcggcggtggaggggttgcagctgacca

SEQ ID NO: 32168 - DNA, 109 bp, Unknown
  Description of Unknown: RightRegion for integrase B6169 sequence
gcaggtagtggttcgcctgcgggtaaggatggggagccaataacagaaacagataggtaaagaaatatttacctatctgtttttttgttatatattattttttatagat

SEQ ID NO: 32169 - DNA, 260 bp, Unknown
  Description of Unknown: RightRegion for integrase B6170 sequence
aaaagtatgattgaccgagtggttttgagtgaggatggcgtggatgttcggttcaaataacacgcagaaggtataaattttaaaaatgagctattccaaatctgagatatgaaatagctcattcatttattgatcttctctttgcaacaaaataatttttaaaagctctggatgttcttctaacaattcttgctggcgctttatttgtttttctctttcttcttccgtaataataataaatttataatcacgtttttcat

SEQ ID NO: 32170 - DNA, 260 bp, Unknown
  Description of Unknown: RightRegion for integrase B6171 sequence
cgcattgatattgatggggaggatataaccattcactggctgttcgctcctgaaaactaaaaaaggcggggcttgcgccctgccttttcttattctttagccgttactgctgccgcctgggtcgcgtgacaaacaaacaatcacctccacgtgccttgtccttgggaacaaatccacgggctgaaccttttccagcgtatacccctgttcacacaggaacttagcatcgcgggcggcggtggaggggttgcagctgacca

SEQ ID NO: 32171 - DNA, 260 bp, Unknown
  Description of Unknown: RightRegion for integrase B6172 sequence
aaaagtatgattgaccgggtggttttgagtgaggatggcgtggatgtccggttcaaataaaaggaggaaaagcaatcgcttttcctcttttctttttgtttcctatgtatccacatcccactggatagaatcatacccattttcctttgccgttcggattacgttatcgttatactctccaaatggcgggcggaataaattcatatcaatgccggtcaattcttttacagcctgatgacacccttgcaattcctcagtga

SEQ ID NO: 32172 - DNA, 260 bp, Unknown
  Description of Unknown: RightRegion for integrase B6173 sequence
gccaaagatgcctcggagggcaatggttcggattttggttgcttcgctccaccaagataaaacacctagaaacgtaagtttctgggtgtttttcttttattgtaacccactaccaaacccactattttctctaaaaaaaataagggccgcagccctgtggcgggagctgcggcccgtgctattacttgccctgcgccttcaggcggtcaaaggtcttgtctgcttccagtgcagcggtgaacttggtggtgctgcccatc

SEQ ID NO: 32173 - DNA, 260 bp, Unknown
  Description of Unknown: RightRegion for integrase B6174 sequence
cgcattgatattgatggggaggatataaccattcactggctgttcgctcctgaaaactaaaaaaggcggggcttgcgccctgccttttcttattctttagccgttactgctgccgcctgggtcgcgtgacaaacaaacaatcacctccacgtgcttcgtcctcgggaacagatccaccggctggacctccacggctttatacccgtgctcggtcagccacttggcatcccttgccgctgttgcggcgttgcagctgacca

SEQ ID NO: 32174 - DNA, 260 bp, Unknown
  Description of Unknown: RightRegion for integrase B6175 sequence
agttcgactttagaacagttgtgcctattaaatcacccgttccaatatgaactggagtaataattttaactgtgctcatacttataccgaaaaaccaataccataatgataaatacatttaccttctgtcatggtctctattatccttccatagtattcttttttctgattcactttcatccaactaccctctaaaaaatgtacatattttccatttatgaagccacctgtatattctttagaagaacgataaatatccc

SEQ ID NO: 32175 - DNA, 260 bp, Unknown
  Description of Unknown: RightRegion for integrase B6176 sequence
gccaaaggtgccccagagggcaatggttcggatttgggttgcttcgctccaccaagataaaacacctagaaacgtgagtttctgggtgtttttcttttgctgtaacccacagtcaaacccacttttgcgggaaactatgcgaaaatcaagcaaaaataggctgccacgcatcacactcgcatggcagccgtttcgttaccctttcaccacggcattgtaaagcatctccaagaactgcaccgcgctgggtgcaccggtca

SEQ ID NO: 32176 - DNA, 109 bp, Unknown
  Description of Unknown: RightRegion for integrase B6177 sequence
tacaacaaagaaaaggacacccttgaagtgtattactactacaagccgcaaacccagtaaatacaagggtttgcgggtatttgtaggttcttgcaaaaaggtcaaccag

SEQ ID NO: 32177 - DNA, 109 bp, Unknown
  Description of Unknown: RightRegion for integrase B6178 sequence
aaaattgtctacgaccgagaacaagattctctgaaaatctattatttcttatatcagtaaaatacccgcaaaccactgtaaaataagggcttgcgggtattttatacgt

SEQ ID NO: 32178 - DNA, 260 bp, Unknown
  Description of Unknown: RightRegion for integrase B6179 sequence
cgaacccaggtactggcactcgggcgctccgtgttcatcagattttctcgggccgcctaaaatagcaactactgaaaaaggggaggtcccgcgaggagcctcccctttacttttggctatcccaccaccagcacttggccggggtagatcacgttcgggttcgccagaccgttcaccttggccagcgtccggtagtccgtgccgtacttggcggcgatgcccgagagcgtgtcgccgctcttgaccgtgtaggtcttctt

SEQ ID NO: 32179 - DNA, 260 bp, Unknown
  Description of Unknown: RightRegion for integrase B6180 sequence
aaccattcttccgtttcggtaaaatgttcggattccgaaagtgtgggtctgccagaatgaaacgctaatcttgataccaaggttagcgtttttttatgcattgaaaagccttgtcccataaggcttttcgcactctgccgggtgaaaacgccccttgctctactctcgcgagtgggtgcaaggggcgtttttttcaggtttagcagattccccggctactggctgggtgcaagatcaaacggcagcttcctgctacaata

SEQ ID NO: 32180 - DNA, 260 bp, Unknown
  Description of Unknown: RightRegion for integrase B6181 sequence
cgaacccaggtactggcgctcgggcgctccgtgttcatcagattttctcgggccgcctaaaatagcaactactgaaaaaggggaggtcccgcgaggagcctcccctttacttttggctatcccaccaccagcacttggccggggtagatcacgttcgggttcgccaacccgttcgccttggccagcgtccggtagtccatgccgtacttggcggcgattcccgagagcgtgtcgccgctcttgaccgtgtaggtcttctt

SEQ ID NO: 32181 - DNA, 260 bp, Unknown
  Description of Unknown: RightRegion for integrase B6182 sequence
cgcattgatattgatggggaggatataaccattcactggctgttcgctcctgaaaactaaaaaaggcggggcttgcgccctgccttttcttattctttagccgttactgctgccgcctgggtcgcgtgacaaacaaacaatcacctcgaccattgtttcattttccaagggcaattctttcacttccgtcccatttacaggaacagggaagttgaagatgatcttcctgatccagttaccgtccagctgcttttccggga

SEQ ID NO: 32182 - DNA, 109 bp, Unknown
  Description of Unknown: RightRegion for integrase B6183 sequence
tacaacaaagaaaaagacacacttgaagtgtattactactacaagccgcaaacccagtaaatacaagggtttgcgggtgtttgtatgtccttgcaaaaaggtcaaccag

SEQ ID NO: 32183 - DNA, 260 bp, Unknown
  Description of Unknown: RightRegion for integrase B6184 sequence
cgcattgatattgatggggaggatataaccattcactggctgttcgctcctgaaaactaaaaaaggcggggcttgcgccctgccttttcttattctttagccgttactgctgccgcctgggtcgcgtgacaaacaaacaatcacctccacgtgtcttgtccttgggaacaaatccacgggctgaaccttttccagcgtatacccctgttcacacaggaacttagcatcgcgggcggcggtggaggggttgcagctgacca

SEQ ID NO: 32184 - DNA, 260 bp, Unknown
  Description of Unknown: RightRegion for integrase B6185 sequence
tacaataaagaggaagacactctcgaagtgtattactactacaagccgcaaacccagtaaccatgcgggtttgcgtgtgtttgtacgtccttgcaaaaaggtcaaccagtttggacaactcactctgcgaccatcacaatactgtgtcaggattggctggcgcacattcggccgtgacagatagtctgcaaacagttcatccacaatcactgaaataggctcaaatatattgcgctccggtatccatttatggtcaaatg

SEQ ID NO: 32185 - DNA, 260 bp, Unknown
  Description of Unknown: RightRegion for integrase B6186 sequence
cgcattgatattgatggggaggatataaccattcactggctgttcgctcctgaaaactaaaaaaggcggggcctgcgccctgccttttcttattctttagccgttactgctgccgcctgggtcgcgtgacaaacaaacaatcacctcgacgtgtcctgtcctgagagtttggtatatcacttttgcgacccaacagccccggctattctggccggggccttttttattcggtttcgttgctgtcgtcggctatggctgcc

SEQ ID NO: 32186 - DNA, 260 bp, Unknown
  Description of Unknown: RightRegion for integrase B6187 sequence
gcgaaagatgccccagagggcaatggttcggatttggattgcttcgctccaccaagataaaacacctagagacgtaagtttctgggtgcttttcttttgctgtaacccacagttaaacccacttttgcgggaaactatgcgaaaatcagcaaaaataggctgccacgcatcacactcgcatggcagccttttcgttaccctctcaccacgacattgtaaagcatctctaggaactgcaccgcgctgggtgcaccggtcag

SEQ ID NO: 32187 - DNA, 260 bp, Unknown
  Description of Unknown: RightRegion for integrase B6188 sequence
tacaacaaagaaaaggacacacttgaagtgtattactactacaagccgcaaacccagtaaatacaagggtttgcgggtgtttgtaggttcttgcaaaaaggtcaaccagttcgggcagctcactctccgcccatcacaatactgcgtcaggatcggctgccgcacattgggtcttgaaagataatcagcaaacagttcatccacaatcacagaaatcgaatcaaaaatatttctctcaggaatccacttatggtcaaagg

SEQ ID NO: 32188 - DNA, 78 bp, Unknown
  Description of Unknown: RightRegion for integrase B6189 sequence
aagggttcgtctaattcaactcgggtggagacgagggggatcgaacccctgacctcttgactgccagtcaagcgctct

SEQ ID NO: 32189 - DNA, 260 bp, Unknown
  Description of Unknown: RightRegion for integrase B6190 sequence
cgcattgatattgatggggaagatataaccattcactggctgttcgctcctgaaaactaaaaaaggcggggcttgcgccctgccttttcttattctttagccgttactgctgccgcctgggtcgcgtgacaaacaaacaatcacctctacgtgtcctgtcctgagagtttggtatatcacttttgcgacccaacagccccggctattctggccggggccttttttattcggtttcgttgctgtcgtcggctatggctgcc

SEQ ID NO: 32190 - DNA, 260 bp, Unknown
  Description of Unknown: RightRegion for integrase B6191 sequence
aaggcaaagaagaccaagccggcggactttcaactccgtttcgaccttagatttctctgagactgccgttgctattttatccttcattatctataaggcgctatatcttcctctttgcaagaatcatagatcttcttcgtgtgtatgcacacggcctcgcggatacaggcagtatcctgcaccggaccgggcatgaccttctcaggcattgcaatacctcctagcagagtattcaaaaggcccttccttccccgctctat

SEQ ID NO: 32191 - DNA, 260 bp, Unknown
  Description of Unknown: RightRegion for integrase B6192 sequence
acatacaccaatgggagggcaggaaatgtcaacggaaaactacgtaaacaaaaaacctaagattacagtcataccggccaaacctcgccaggagatagttggccgccagagcgtcaacggtgagaagaccaaacttcgcgtggcagcatacgccagagtctccacagaccacgaggaacaggaaagcagttacgaggcgcaggtaaaacacttcacggagtacataacacagcgcgaagactggcagcttgccggaatct

SEQ ID NO: 32192 - DNA, 260 bp, Unknown
  Description of Unknown: RightRegion for integrase B6193 sequence
cgcattgatattgatggggaggatataaccattcactggctgttcgctcctgaaaactaaaaaaggcggggcttgcgccctgccttttcttattctttagccgttactgctgccgcctgggtcgcgtgacaaacaaacaatcacctccacatgtcctgtcctgagagtttggtatatcacttttgcgacccaacagccccggctattctggccggggccttttttattcggtttcgttgctgtcgtcggctatggctgcc

SEQ ID NO: 32193 - DNA, 109 bp, Unknown; identical to SEQ ID NO: 32168
  Description of Unknown: RightRegion for integrase B6194 sequence

SEQ ID NO: 32194 - DNA, 260 bp, Unknown
  Description of Unknown: RightRegion for integrase B6195 sequence
gaaaaaattgtatttaacaaagaaactgacacggcggagatatactattactacctgtaaacccctttgtttatgagcgttttacagttttctatgttattgtggtaaggatgaccttattgtaagaacatagaaataacgaagaaaatgatacaatattaatccccggcgacagccggggtttctttttacattcgtcctctaatgtcatttcttctgctctctcatattcctaaattttcttaggcctcttaaaatat

SEQ ID NO: 32195 - DNA, 109 bp, Unknown
  Description of Unknown: RightRegion for integrase B6196 sequence
tatgatcgtgattctgatgaattgaaagtgtattactattatacgccggaacccttgtaaatactgggttccgagcattttgtatgttgttgcaaaaaggtcatccaat

SEQ ID NO: 32196 - DNA, 260 bp, Unknown
  Description of Unknown: RightRegion for integrase B6197 sequence
aaggaagccggaacgcttgactgcttcctgaatacttccatcgaaaagatttcaaaatagacaaagccccgaaaacaggggctttgttccacccctaaacttgccgaatacggaccgccgtattgactgatgatcaccatcgccgccttcggatctgtcctggtaatatgaaccggatattccagtcttttttcataattaaacatatgacaaactccattctattttattaaatatgaaattaaaatgtcagaaacgcg

SEQ ID NO: 32197 - DNA, 260 bp, Unknown
  Description of Unknown: RightRegion for integrase B6198 sequence
aaggaagccggaacgcttgactgtttcctgaatacttccatcgaaaagatttcaaaatagacaaagcccctattttcggggctttgtgccaccactatacttgccgaatacggtggtcccgacggagaggccggagctgcaatgcgctatctgtcacagcgatattccatggaggaccgcaaggtggccggagccctgacagacatcggcaccgaagaattaggccatctggaaattgtcgcaaccatcatccaccagct

SEQ ID NO: 32198 - DNA, 260 bp, Unknown
  Description of Unknown: RightRegion for integrase B6199 sequence
gccaaagatgcctcagagggcaatggttcggatttgggttgcttcgctccaccaagataaaacacctagaaacgtaagtttctgggtgtttttcttttgccgtaacccacagtcaaacccactttttcgcgtggcagcctttttcgttaccccctcaccacggcattgtaaagcatctccaggaactgcaccgcgctgggtgcgccggtcagcgggtagccagccaactgctgaacgccttcgggattgagcgcccaggc

SEQ ID NO: 32199 - DNA, 109 bp, Unknown
  Description of Unknown: RightRegion for integrase B6200 sequence
aaaattgtctacaaccgagaacaagattctctgaaaatctattatttcttatatcggtaaaatacccgcaaaccactgtaaaataagggcttgcgggttctttatacgt

SEQ ID NO: 32200 - DNA, 109 bp, Unknown; identical to SEQ ID NO: 32176
  Description of Unknown: RightRegion for integrase B6201 sequence

SEQ ID NO: 32201 - DNA, 260 bp, Unknown
  Description of Unknown: RightRegion for integrase B6202 sequence
cgaacccaggtactggcgctcgggcgctccgtgttcatcaggttttctcgggccgcctaagaagaaggggagaccccgcgaggagcctcccctttgttttggctattcgaccaccaaaacttggccggggtagatcacgttcgggttcgccagcccgttcgccttggccagcgtctggtagtccgtgccgtacgtggcggcgatgcccgagagcgtgtcgccgctcttgaccgtgtaggtcttcttggacgacgcgccga

SEQ ID NO: 32202 - DNA, 260 bp, Unknown
  Description of Unknown: RightRegion for integrase B6203 sequence
cgcattgatattgatggggaggatataaccattcactggctgttcgctcctgaaaactaaaaaaggcggggcctgcgccctgccttttcttattctttagccgttactgctgccgcctgggtcgcgtgacaaacaaacaatcacctcgacgtgctttgtccttgggaacaaatccacgggctgaaccttttccagcgtatacccctgttcacacaggaacttagcatcgcgggcggcggtggaggggttgcagctgacca

SEQ ID NO: 32203 - DNA, 109 bp, Unknown
  Description of Unknown: RightRegion for integrase B6204 sequence
tacaacaaagaaaaggacacccttgaagtgtattactactacaagccgcaaacccagtaaatacaagggttttcgggtgtttgtaggttcttacaaaaaggtcaaccag

SEQ ID NO: 32204 - DNA, 260 bp, Unknown
  Description of Unknown: RightRegion for integrase B6205 sequence
cacatcgtattcgacaggaagaacacaagtcttgatgtgttcttaaagcttgtaatttagcggtttctatctgttatagggtattgcagtaccgaccgccatataccaatagcctacaatataaatgggaaggaactgttccgttttgttccttcctattctaccgtaaaacccatcatatttctacacaaaattatagcttgtccaaaaactctttcttccacttcttatcgtcggtccagtatgccgggcaaggcttt

SEQ ID NO: 32205 - DNA, 109 bp, Unknown
  Description of Unknown: RightRegion for integrase B6206 sequence
aagattatttatgataaagagtcagattctttgaaaatttatttttttctatgtcgttaagaatgcccgcaaacccagtaaaatcaagggtttgcgggcactttatacg

SEQ ID NO: 32206 - DNA, 260 bp, Unknown
  Description of Unknown: RightRegion for integrase B6207 sequence
aaaattatctacgatcgcaagaacgattctcttaaaatctactttttcctatacaggtaaaatacccgcaagcccagtaaaatcaagggtttgcgggtactttataggttatgacaatttggttgacccaatggggatccaaatccttaggcgaccagggctattcccctatcgaaattctccgttactactacggtgacgacatgtacattaacaccgccgaagccatctccggcatcccatcctcctggcctggctat

SEQ ID NO: 32207 - DNA, 109 bp, Unknown
  Description of Unknown: RightRegion for integrase B6208 sequence
aagattatctacgatcgcaaaaacgattctctcaaaatctactttttcttatacaggtaaaatgcccgcaaacccagtaaaatcaagagtttgcgtgtactttataggt

SEQ ID NO: 32208 - DNA, 109 bp, Unknown
  Description of Unknown: RightRegion for integrase B6209 sequence
tatgatcgctcaaaagatgagctgaaagtttattactactatgcgccggaatctcagtaaaatcaagggatttcgcagttttgtaggttataacaaaaaggtcatccaa

SEQ ID NO: 32209 - DNA, 109 bp, Unknown
  Description of Unknown: RightRegion for integrase B6210 sequence
gccaaagatgcaagcaaagatgaattcattttagaggtgcatccaaaattaccaaaatagcacttaaacataagttatagacttgcttggaagtaactttcagctatag

SEQ ID NO: 32210 - DNA, 109 bp, Unknown
  Description of Unknown: RightRegion for integrase B6211 sequence
tatgatcgctcaaaagatgagctgaaagtttattactactatgcgccggaatcccagtaaaatcaagggttttcgcagttttgtaggttataacaaaaaggtcatccaa

SEQ ID NO: 32211 - DNA, 260 bp, Unknown
  Description of Unknown: RightRegion for integrase B6212 sequence
aagattatctacgatcgcaagaacgattctctcaaaatctactttttcttatacaggtaaaatgcccgcaaccccagtaaaatcaagggtttgcgggtactttataggttatgacaatttggttgacccaatggggatccaaatccttaggcgaccagggctattcccctatcgaaattctccgttactactacggtgacgacatgtacattaacaccgccgaagccatctccggcatcccatcctcctggcctggctat

SEQ ID NO: 32212 - DNA, 260 bp, Unknown
  Description of Unknown: RightRegion for integrase B6213 sequence
cacatcgtgtttgaccgcggaaacacaagtctcgatatgttcctaaagcttgtaatttagcgggtttcaaggcattatagggtattacaatacggtggtcccgatggcgaaatgggagcttccatgcgctatctggcccagcggttttcttttgcaaatccgcgaattgccggtgtacttactgacatcggaaccgaggaacttgctcacctcgaaatgattggtgcgattgtccgccagctgacacgcggactttccgc

SEQ ID NO: 32213 - DNA, 109 bp, Unknown
  Description of Unknown: RightRegion for integrase B6214 sequence
aagattatctacgatcgtaagaatgattctcttaaaatctacttttttctgtataaatgatatattttaaatatcccgcaagccaagtaaaatcaatggcttgcgggta

SEQ ID NO: 32214 - DNA, 109 bp, Unknown
  Description of Unknown: RightRegion for integrase B6215 sequence
aagattatctacgatcgcaagaacgattctctcaaaatctactttttcttatacaggtaaaatgcccgcaaacccagtaaaatcaagggtttgcgtgtactttataggt

SEQ ID NO: 32215 - DNA, 260 bp, Unknown
  Description of Unknown: RightRegion for integrase B6216 sequence
aagattatctacgatcgcaagaacaattctcttaaaatctactttttcttatacaggtaaagtacacgcaaacccagtaaaatcaagagcttgcgtgtactttataggttataacaatttggttgacccaatggggatccaaatccctaggcgaccagggctattcccctatcgaaattctccgttactactacggtgacgacatgtacattaacaccgccgaagccatctccggcatcccatcctcctggcctggctat

SEQ ID NO: 32216 - DNA, 260 bp, Unknown
  Description of Unknown: RightRegion for integrase B6217 sequence
aagattatctacgatcgtaagaatgattctcttaaaatctactttttcttatacaggtaaaatgcccgcaagcccagtaaaatcaagaacttgcgtgtactttataggttataacaatttggttgacacaatggggatccaaatcattaggcgatcagggctactcccctatcgaaatcctacgctattattatggtgatgatatgtacatcaacaccgccgaagccatctccggcattccgtcctcctggcctggttat

SEQ ID NO: 32217 - DNA, 109 bp, Unknown; identical to SEQ ID NO: 32210
  Description of Unknown: RightRegion for integrase B6218 sequence

SEQ ID NO: 32218 - DNA, 260 bp, Unknown
  Description of Unknown: RightRegion for integrase B6219 sequence
aagattatctacgatcgcaagaacgattctcttaaaatctactttttcttataccggtaaaatacccgcaagccaagtaaaatcaagggtttgcgggtactttataggttatgacaatttggttgacccaatggggatccaaatccttaggcgaccagggctattcccctatcgaaattctccgttactactacggtgacgacatgtacattaacaccgccgaagccatctccggcatcccatcctcctggcctggctat

SEQ ID NO: 32219 - DNA, 260 bp, Unknown
  Description of Unknown: RightRegion for integrase B6220 sequence
aagattatctacgatcgcaagaacgattctcttaaaatctactttttcctatacaggtaaaatacccgcaagcccagtaaaatcaggggtttgcgggtactttataggttatgacaatttggttgacccaatggggatccaaatccttaggcgaccagggctattcccctatcgaaattctccgttactactacggtgacgacatgtacattaacaccgccgaagccatctccggcatcccatcctcctggcctggctat

SEQ ID NO: 32220 - DNA, 260 bp, Unknown
  Description of Unknown: RightRegion for integrase B6221 sequence
aagattatttatgataaagagtcagattctttgaaaatttatttttttctatgtcgttaagaatgcccgcaaacccttgattttactgggtttgcgggcactttatacgttattgaagttcggtggaccggatggagaattaggagcttctttgagatatttttctcagagatataccatgccttataatgaagtaattggcacactaacagacattgctaccgaagaatttgcccatatggaaatcgtatgcgccattg

SEQ ID NO: 32221 - DNA, 260 bp, Unknown
  Description of Unknown: RightRegion for integrase B6222 sequence
tatgatcgctcaaaagatgagctgaaagtttattactactatgcgccggaatctcagtaaaatcaagggatttcgcagttttgtaggttataacaaaaaggtcatccaattcggacagctcaccattttcccgtcacaatactgtgtcaatatcggctgccgcacgttcggtcttgaaagataatttgcaaacaattcatctacgatcacggaaatgctttcatatacatttctttccggtatccacttatgatcgaatg

SEQ ID NO: 32222 - DNA, 260 bp, Unknown
  Description of Unknown: RightRegion for integrase B6223 sequence
aagattatctacgatcgtaagaatgattctcttaaaatctactttttcttatacaggtaaaatgcctgcaaacccagtaagatcaagagtttgcgtgtactttataggttatgacaatttggttgacccaatggggatccaaatccttaggcgaccagggctattcccctatcgaaattctccgttactactacggtgacgacatgtacattaacaccgccgaagccatctccggcatcccatcctcctggcctggctat

SEQ ID NO: 32223 - DNA, 109 bp, Unknown; identical to SEQ ID NO: 32208
  Description of Unknown: RightRegion for integrase B6224 sequence

SEQ ID NO: 32224 - DNA, 260 bp, Unknown
  Description of Unknown: RightRegion for integrase B6225 sequence
gaaaagatgtgctaccggaagcaaagctccgatatgtcgctgcacatcgattttttatgactttatatgtacaagtacgatatagtgtcaagctgcaataccccgttcggatcaaaacacccaacgccagaacggcgaagtatattatttcacagcttggcggcccagacggagagttggctgcttcgctacggtatatgcaccagcgatacacggcaaaacctgacaaagtaaaaggagttttgacagatattgccaca

SEQ ID NO: 32225 - DNA, 260 bp, Unknown
  Description of Unknown: RightRegion for integrase B6226 sequence
aaacttttagtaaaacacgtttggctcggatcaggtaaggtagaaattgaatggaagtaggcttcttagcctacttttatttttgtttctaatgtttcagtattagaaataaaaagaaaggaatttttaaatatttcaaaaaagttcttgattttagcgttacgctatgatacaattatatcataaaagaggtgatgaagtggatgatgtacgggacatacttaaagccgtactggcaatggtactgtttgaagtaataa

SEQ ID NO: 32226 - DNA, 260 bp, Unknown
  Description of Unknown: RightRegion for integrase B6227 sequence
aagattatttatgataaagagtcagattctttgaaaatttatttttttctatgtcgttaagaatgcccgcaaacccagtaaaatcaagggtttgcgggcactttatacgttattgaagtttggtggaccggatggagaattaggagcttctttgagatatttttctcagagatataccatgccttataatgaagtaattggcacactaacagacattgctaccgaagaatttgcccatatggaaatcgtatgcgccattg

SEQ ID NO: 32227 - DNA, 109 bp, Unknown
  Description of Unknown: RightRegion for integrase B6228 sequence
aaaattatctacgatcgcaagaacgattctcttaaaatctactttttcctatacaggtaaaatacccgcaagcccagtaaaatcaaaggtttgcgggtactttataggt

SEQ ID NO: 32228 - DNA, 109 bp, Unknown
  Description of Unknown: RightRegion for integrase B6229 sequence
cacatcgtattcgacaggaagaacacaagtcttgatgtgttcttaaagcttgtaatttagcggtttctatccgttatagggtattgcagtaccgacctccatactggct

SEQ ID NO: 32229 - DNA, 109 bp, Unknown
  Description of Unknown: RightRegion for integrase B6230 sequence
aaaattatctatgatcgtaagaatgattctcttaaaatctactttttcttatacaggtaaaatgcccgcaaacccagtaaaaatcaagagcttgcgtgtactttatagg

SEQ ID NO: 32230 - DNA, 260 bp, Unknown
  Description of Unknown: RightRegion for integrase B6231 sequence
aagattatctacgatcgcaagaacgattctcttaaaatctactttttcttatacaggtaaaatgcccgcaaacccagtaaaatcaagggtttgcgtatactttataggttataacaatttggttgacccaatggggatccaaatccttaggcgaccagggctattcccctatcgaaattctccgttactactacggtgacgacatgtacattaacaccgccgaagccatctccggcatcccatcctcctggcctggctat

SEQ ID NO: 32231 - DNA, 260 bp, Unknown
  Description of Unknown: RightRegion for integrase B6232 sequence
aagattatctacgatcgcaagaacgattctcttaaaatctactttttcttatacaggtaaaatgcccgcaaacccagtaaaatcaagggtttgcgtatactttataggttataacaatttggttgacctttttgctataacctataaagtggatttttacctatttatatgctacattttagcaaaaatcatctaaattgaatagcctcgattctaagttcctgtcctacagttccaagagtagctactccatcggctct

SEQ ID NO: 32232 - DNA, 260 bp, Unknown
  Description of Unknown: RightRegion for integrase B6233 sequence
cacatcgtgtttgaccgcggaaatacaagtctcgatatgttcctaaagcttgtaatttagcgggtttcaaggcattatagggtattacgatacggtggtcccgatggcgaaatgggagcttccatgcgctatctggcccagcggttttcttttgcaaatccgcggattgccggtgtacttactgacatcggaaccgaggaacttggtcacctcgaaatgattggtgcgattgtccgccagctgacacgcggactttccgc

SEQ ID NO: 32233 - DNA, 260 bp, Unknown
  Description of Unknown: RightRegion for integrase B6234 sequence
aagatcatttatgataaagagtcagattctttgaaaatttatttttttctatgtcgttaagaatgcccgcaaacccagtaaaatcaatggtttgcgggcactttatacgttattgaagttcggtggaccggatggagaattaggagcttctttgagatatttttctcagagatataccatgccttataatgaagtaattggcacactaacagacattgctaccgaagaatttgcccatatggaaatcgtatgcgccattg

SEQ ID NO: 32234 - DNA, 260 bp, Unknown
  Description of Unknown: RightRegion for integrase B6235 sequence
aagattatctacgatcgcaagaacgattctctcaaaatctactttttcttatacaggtaaaatgcccgcaagcccagcaaaatcaagggtttacgtgtactttataggttataacaatttggttgacccaatggggatccaaatccttaggcgaccagggctattcccctatcgaaattctccgttactactacggtgacgacatgtacattaacaccgccgaagccatctccggcatcccatcctcctggcctggctat

SEQ ID NO: 32235 - DNA, 260 bp, Unknown
  Description of Unknown: RightRegion for integrase B6236 sequence
aagattatctatgatcgcaagaacgattctctcaaaatctactttttcttatacaggtaaaatacccgcaaacccttgattttacttggcttgcgggtactttataggttatgacaatttggttgacccaatggggatccaaatccttaggcgaccagggctattcccctatcgaaattctccgttactactacggtgacgacatgtacattaacaccgccgaagccatctccggcatcccatcctcctggcctggctat

SEQ ID NO: 32236 - DNA, 109 bp, Unknown; identical to SEQ ID NO: 32228
  Description of Unknown: RightRegion for integrase B6237 sequence

SEQ ID NO: 32237 - DNA, 109 bp, Unknown
  Description of Unknown: RightRegion for integrase B6238 sequence
aagattatatatgataaagagtcagattctttgaaaatttatttttttctatgtcgttaagaatgcccgcaaacccagtaaaatcaagggtttgcgggcactttatatg

SEQ ID NO: 32238 - DNA, 109 bp, Unknown
  Description of Unknown: RightRegion for integrase B6239 sequence
acacctaatccagtagaggttaggtgttcgtccaattatcaaatggtgaccccggagtgattcgaacactcgacacacggcttagaaggccgttgctctatccagctga

SEQ ID NO: 32239 - DNA, 260 bp, Unknown
  Description of Unknown: RightRegion for integrase B6240 sequence
cacatcgtgtttgaccgcggaaatacaagtctcgatatgttcttaaagcttgtaatttagcgggtttcaaggcattatagggtattacgatacggtggtcccgatggcgaaatgggagcttccatgcgctatctggcccagcggttttcttttgcaaatccgcggattgccggtgtacttactgacatcggaaccgaggaacttgctcacctcgaaatgattggtgcgattgtccgccagctgacacgcggactttccgc

SEQ ID NO: 32240 - DNA, 260 bp, Unknown
  Description of Unknown: RightRegion for integrase B6241 sequence
aagattatctacgatcgcaagaacgattctcttaaaatctactttttcctatacaggtaaaatgcccgcaagcccagtaaaatcaagggtttgcgggtgctttataggtggtgacaatttggttgacccaatggggatccaaatccttaggcgaccagggctattcccctatcgaaattctccgttactactacggtgacgacatgtacattaacaccgccgaagccatctccggcatcccatcctcctggcctggctat

SEQ ID NO: 32241 - DNA, 260 bp, Unknown
  Description of Unknown: RightRegion for integrase B6242 sequence
tcagccgtgtcagatagctcctcagcggattgtgctccctctgcgctggggagccaataacgcataatccgaacactttcgttactaagaatgtgttcggatttgttatttatttttgatattgtagccgtccgaattttatgagtttgatatgtacccagaatcctggacacaataaaatagcttaacccatggatgctatcctgtataaaacaggaggcatccattttgttttagcctgtattctaacattgttgtat

SEQ ID NO: 32242 - DNA, 260 bp, Unknown
  Description of Unknown: RightRegion for integrase B6243 sequence
cacatcgtgtttgaccgcggaaacacaagtctcgatatgttcctaaagcttgtaatttagctggtttcaaggcattatagggtattacaatacggtggtcccgatggcgaaatgggagcttccatgcgctatctggcccagcggttttcttttgcaaatccgcggattgccggtgtacttactgacatcggaaccgaggaacttggtcacctcgaaatgattggtgcgattgtccgccagctgacacgcggactttccgc

SEQ ID NO: 32243 - DNA, 260 bp, Unknown
  Description of Unknown: RightRegion for integrase B6244 sequence
aagattatctacgatcgcaagaacgattctctcaaaatctactttttcttatacaggtaaaatacccgcaagccaagtaaaatcaaaggtttgcgggtactttataggttatgacaatttggttgacccaatggggatccaaatccttaggcgaccagggctattcccctatcgaaattctccgttactactacggtgacgacatgtacattaacaccgccgaagccatctccggcatcccatcctcctggcctggctat

SEQ ID NO: 32244 - DNA, 109 bp, Unknown
  Description of Unknown: RightRegion for integrase B6245 sequence
aagattgtctacgatcgtaagaatgattctcttaaaatctactttttcctatacaggtaaaatgcccgcaagcccagtaaaatcaagagcttgcgtgtactttataggt

SEQ ID NO: 32245 - DNA, 260 bp, Unknown
  Description of Unknown: RightRegion for integrase B6246 sequence
aagattatttatgataaagagtcagattctttgaaaatttatttttttctatgtcgttaagaatgcccgcaaacccttgattttactgggtttgcgggcactttatacgttattgaagttcggtggaccggatggagaattaggagcttctttgagatatttttctcagagatataccatgccttataatgaagtaattggcacactaacagacattgctaccgaggaatttgcccatatggaaatcgtatgcgccattg

SEQ ID NO: 32246 - DNA, 109 bp, Unknown
  Description of Unknown: RightRegion for integrase B6247 sequence
aagattatctacgatcgcaaaaacgattctctcaaaatctactttttcttatacaggtaaaatgcctgcaaacccagtaaaatcaaaagtttgcgtgtactttataggt

SEQ ID NO: 32247 - DNA, 260 bp, Unknown
  Description of Unknown: RightRegion for integrase B6248 sequence
gatcttgatggtgaaaacatagacattcattggagctttgctcctgggaaatcggaataaataaaggccgcccagcatggacggccttttcgcataatttgcggaatcgctgaatttacgcgcggttttcgctgacttttcgcaaaatgcgcggataacgcgattttgttgacgtcgccaaaatcgggatgttttcgcggcgtcacgaaaacatggagcggttacgggtctacccgtgtataacaaacgcaagcctccac

SEQ ID NO: 32248 - DNA, 260 bp, Unknown
  Description of Unknown: RightRegion for integrase B6249 sequence
aagattatctacgatcgcaagaacgattctctcaaaatctactttttcttatacaggtaaaatgcccgcaagcccagtaaaatcaagggtttgcgggtgctttataggttgtgacaatttggttgacccaatggggatccaaatccttaggcgaccagggctattcccctatcgaaattctccgttactactacggtgacgacatgtacattaacaccgccgaagccatctccggcatcccatcctcctggcctggctat

SEQ ID NO: 32249 - DNA, 109 bp, Unknown
  Description of Unknown: RightRegion for integrase B6250 sequence
aagattatctacgatcgcaagaacgattctctcaaaatctactttttcttatacaggtaaaatgcccgcaaacccagtaaaaccaagggtttgcgggtactttataggt

SEQ ID NO: 32250 - DNA, 260 bp, Unknown
  Description of Unknown: RightRegion for integrase B6251 sequence
tcagccgtgtcagatacctcctcagcggattgtgctccctctgcgctggggagccaataacgcataatccgaacactttcgttactaagaatgtgttcggatttgttatttatttttgatattgtagccgtccgaattttatgagtttgatatgtacccagaatcctggacacaataaaatagcttaacccatggatgctatcctgtataaaacaggaggcatccattttgttttagcctgtattctaacattgttgtat

SEQ ID NO: 32251 - DNA, 260 bp, Unknown
  Description of Unknown: RightRegion for integrase B6252 sequence
aagatcatttatgataaagagtcggattctttgaaaatttatttttttctatgtcgttaagaatgcccgcaaacccagtaaaaaatcaagggtttacgggcactttatacgttattgaagttcggtggaccggatggagaattaggagcttctttgagatatttttctcagagatataccatgccttataatgaagtaattggcacactaacagacattgctaccgaagaatttgcccatatggaaatcgtatgcgccat

SEQ ID NO: 32252 - DNA, 260 bp, Unknown
  Description of Unknown: RightRegion for integrase B6253 sequence
aagattatctacgatcgcaagaacgattctctcaaaatctactttttcttatacaggtaaaatgcccgcaaacccagtaaaatcaagagtttgcgtgtactttataggttataacaatttggttgacccaatggggatccaaatccttaggcgaccagggctattcccctatcgaaattctccgttactactacggtgacgacatgtacattaacaccgccgaagccatctccggcatcccatcctcctggcctggctat

SEQ ID NO: 32253 - DNA, 109 bp, Unknown; identical to SEQ ID NO: 32205
  Description of Unknown: RightRegion for integrase B6254 sequence

SEQ ID NO: 32254 - DNA, 260 bp, Unknown
  Description of Unknown: RightRegion for integrase B6255 sequence
cacatcgtgtttgaccgcggaaacacaagtctcgatatgttcctaaagcttgtaatttagcgggtttcaaggaattatagggtattacgatacggtggtcccgatggcgaaatgggagcttccatgcgctatctggcccagcggttttcttttgcaaatccgcggattgccggtgtacttactgacatcggaaccgaggaacttgctcacctcgaaatgattggtgcgattgtccgccagctaacacgcggactttccgc

SEQ ID NO: 32255 - DNA, 260 bp, Unknown
  Description of Unknown: RightRegion for integrase B6256 sequence
cacatcgtgtttgaccgcggaaacacaagtctcgatatgttcctaaagcttgtaatttagcgggtttcaaggaattatagggtattacgatacggtggtcccgatggcgaaatgggagcttccatgcgctatctggcccagcggttttcttttgcaaatccgcggattgccggtgtacttactgacatcggaaccgaggaacttggtcacctcgaaatgattggtgcgattgtccgccagctgacacgcggactttccgc

SEQ ID NO: 32256 - DNA, 109 bp, Unknown
  Description of Unknown: RightRegion for integrase B6257 sequence
aagattatctacgatcgcaagaacgattctctcaaaatctactttttcttatacaggtaaaatgcccgcaaacccagtaaaaccaatggtttgcgggtactttataggt

SEQ ID NO: 32257 - DNA, 109 bp, Unknown
  Description of Unknown: RightRegion for integrase B6258 sequence
aagattatctacgatcgcaagaacgattctcttaaaatctactttttcctatacaggtaaaatgcccgcaagcccagtaaaatcaagggtttgcgggtgctttacaggt

SEQ ID NO: 32258 - DNA, 102 bp, Unknown
  Description of Unknown: RightRegion for integrase B6259 sequence
cacatcgtattcgacaggaagaacacaagtcttgatgtgttcttaaagcttgtaatttagcggtttctatccgttatagggtattgcagtaccgaccgccat

SEQ ID NO: 32259 - DNA, 136 bp, Unknown
  Description of Unknown: RightRegion for integrase B6260 sequence
aagattatctacgatcgcaagaacgattctcttaaaatctactttttcttataccggtaaaatacccgcaagccaagtaaaatggtgtgctacccgtcaagtagacaaattaaataacgaaaattttttcttcccc

SEQ ID NO: 32260 - DNA, 260 bp, Unknown
  Description of Unknown: RightRegion for integrase B6261 sequence
cacatcgtgtttgaccgcggaaacacaagtctcgatatgttcttaaagcttgtaatttagcgggtttcaaggaattttatagggtattacgatacggtggtcccgatggcgaaatgggagcttccatgcgctatctggcccagcggttttcttttgcaaatccgcggattgccggtgtacttactgacatcggaaccgaggaacttgctcacctcgaaatgattggcgcgattgttcgccagctgacgcgcggactttcc

SEQ ID NO: 32261 - DNA, 109 bp, Unknown
  Description of Unknown: RightRegion for integrase B6262 sequence
aaaattatctacgatcgcaagaacaattctcttaaaatctactttttcttatacaggtaaaatgcccgcaaacccagtaaatgtgagggtttggtaaggatgtttttaa

SEQ ID NO: 32262 - DNA, 260 bp, Unknown
  Description of Unknown: RightRegion for integrase B6263 sequence
attctcatatcccacattgatgcaaccagtgagagcgttacaatccactggaaaatctaaagcctgtttcacttggcattatgcctttgtaaaaaatagtttctgatcttccagcaacacagccctctgccgttccagctgacgcagttggtctccaatgcccagttcatccatccggcaggccatcgccgccgtgctgtccccaggcgttccaccacggggcattccatcggtgcccattccccgcatagggtccactt

SEQ ID NO: 32263 - DNA, 260 bp, Unknown
  Description of Unknown: RightRegion for integrase B6264 sequence
aagattatctacgatcgcaagaacgattctcttaaaatctactttttcttatacaggtaaaatgcccgcaaacccagtaaaatcaagggtttgcgggtactttataggttataacaatttggttgacccaatggggatccaaatccttaggcgaccagggctattcccctatcgaaattctccgttactactacggtgacgacatgtacattaacaccgccgaagccatctccggcatcccatcctcctggcctggctat

SEQ ID NO: 32264 - DNA, 260 bp, Unknown
  Description of Unknown: RightRegion for integrase B6265 sequence
ttgaccgctgactcagcggaggaaaaaagttcggatttgtccagctctgctggaccataagtccaacgatttcacgttagaaatcgttggacttttttgtttataggctggcctcatttggctttgaccacaattttgaccacaatgccaaagattttatctggtcaatcgcaggggcaagtgggcttttttgacgcaacatcatctgctgcgatatgcgagccagcgttgatgccaacgatttgaaaagctggctcgcg

SEQ ID NO: 32265 - DNA, 260 bp, Unknown
  Description of Unknown: RightRegion for integrase B6266 sequence
aagattatctacgatcgcaagaacgattctctcaaaatctactttttcttatacaggtaaaatgcccgcaaacccagtaaaaccaaggggttgcgggtactttataggttgtgacaatttggatgacacaatggggatccaaatcattaggcgatcagggctactcccctatcgaaatcctacgctattattatggtgatgacatgtacatcaacaccgccgaagccatctccggcattccgtcctcctggcctggttat

SEQ ID NO: 32266 - DNA, 109 bp, Unknown
  Description of Unknown: RightRegion for integrase B6267 sequence
aagattatctacgatcgcaagaacgattctcttaaaatctactttttcctatacaggtaaaatgcccgcaagcccagtaaaatcaagggtttgcgtatactttataggt

SEQ ID NO: 32267 - DNA, 260 bp, Unknown
  Description of Unknown: RightRegion for integrase B6268 sequence
gatcttgatggtgaaaacatagacattcattggagctttgctcctggggaatcggaataaataaaggccgcccagcatggacggccttttcgcttaatttgcggaatcgctgaatttacgcgcggttttcgctgacttttcgcaaaatgcgcggataacgcgattttgttgacgtcgccaaaatcggaatgttttcgcggcgtcacgaaaacatgggggcggttacgggtctacccgtgtataacaaacgcaagcctcca

SEQ ID NO: 32268 - DNA, 260 bp, Unknown
  Description of Unknown: RightRegion for integrase B6269 sequence
aaaattatctacgatcgcaagaacgattctcttaaaatctactttttcttatacaggtaaaatgcccgcaaacccagtaaaaccaagggtttgcgggtgctttataggttgtgacaatttggttgacccaatggggatccaaatccttaggcgaccagggctattcccctatcgaaattctccgttactactacggtgacgacatgtacattaacaccgccgaagccatctccggcatcccatcctcctggcctggctat

SEQ ID NO: 32269 - DNA, 260 bp, Unknown
  Description of Unknown: RightRegion for integrase B6270 sequence
cacatcgtgtttgaccgcggaaacacaagtctcgatatgttcctaaagcttgtaatttagtgggtttcaaggcattatagggtattacgatacggtggtcccgatggcgaaatgggagcttccatgcgctatctggcccagcggttttcttttgcaaatccgcggattgccggtgtacttactgacatcggaaccgaggaacttgctcacctcgaaatgattggtgcgattgtccgccagctgacacgcggactttccgc

SEQ ID NO: 32270 - DNA, 109 bp, Unknown
  Description of Unknown: RightRegion for integrase B6271 sequence
cacatcgtgttcgatcgtaagaatacaagccttgatgtgttcctaaagcttgtagtttagcgttttctgaccgttatagggtattgcagtaccgaccgccatactgact

SEQ ID NO: 32271 - DNA, 260 bp, Unknown; identical to SEQ ID NO: 32221
  Description of Unknown: RightRegion for integrase B6272 sequence

SEQ ID NO: 32272 - DNA, 260 bp, Unknown; identical to SEQ ID NO: 32263
  Description of Unknown: RightRegion for integrase B6273 sequence

SEQ ID NO: 32273 - DNA, 260 bp, Unknown
  Description of Unknown: RightRegion for integrase B6274 sequence
aagattatctacgatcgcaagaacgattctcttaaaatctactttttcttatacaggtaaaatacccgcaagccaagtaaaatcaagggtttgcgggtactttataggttataacaatttggttgacccaatggggatccaaatccttaggcgaccagggctattcccctatcgaaattctccgttactactacggtgacgacatgtacattaacaccgccgaagccatctccggcatcccatcctcctggcctggctat

SEQ ID NO: 32274 - DNA, 109 bp, Unknown; identical to SEQ ID NO: 32210
  Description of Unknown: RightRegion for integrase B6275 sequence

SEQ ID NO: 32275 - DNA, 260 bp, Unknown
  Description of Unknown: RightRegion for integrase B6276 sequence
aagattatctacgatcgcaagaacgattctcttaaaatctactttttcctatacaggtaaaatacccgcaagcccagtaaaatcaaaggtttgcgggtactttataggttatgacaatttggttgacccaatggggatccaaatccttaggcgaccagggctattcccctatcgaaattctccgttactactacggtgacgacatgtacattaacaccgccgaagccatctccggcatcccatcctcctggcctggctat

SEQ ID NO: 32276 - DNA, 260 bp, Unknown
  Description of Unknown: RightRegion for integrase B6277 sequence
cacatcgtgtttgaccgcggaaatacaagtctcgatatgttcctaaagcttgtaatttagcgggtttcaaggcattatagggtattacagtacggtggtcccgatggcgaaatgggagcttccatgcgctatctggcccagcggttttcttttgcaaatccgcggattgccggtgtacttactgacatcggaaccgaggaacttgctcacctcgaaatgattggtgcgattgtccgccagctgacacgcggactttccgc

SEQ ID NO: 32277 - DNA, 109 bp, Unknown
  Description of Unknown: RightRegion for integrase B6278 sequence
aagatcatttatgataaagagtcggattctttgaaaatttatttttttctatgtcgttaagaatgcccgcaaacccagtaaaatgatatgctccccatatggtagacaa

SEQ ID NO: 32278 - DNA, 260 bp, Unknown
  Description of Unknown: RightRegion for integrase B6279 sequence
cacatcgtgtttgaccgcggaaacacaagtctcgatatgttcctaaagcttgtaatttagtgggtttcaaggcattatagggtattacgatacggtggtcccgatggcgaaatgggagcttccatgcgctatctggcccagcggttttcttttgcaaatccgcggattgccggtgtacttactgacatcggaaccgaggaacttgctcacctcgaaatgattggtgcgattgttcgccagctgacacgcggactttccgc

SEQ ID NO: 32279 - DNA, 260 bp, Unknown
  Description of Unknown: RightRegion for integrase B6280 sequence
aagattatctatgatcgtaagaatgattctcttaaaatctactttttcttatacaggtaaaatgcccgcaagcccagtaaaatcaagagcttgcgtgtactttataggttatgacaatttggttgacacaatggggatccaaatcattaggcgatcagggctactcccctatcgaaatcctacgctattattatggtgatgacatgtacatcaacaccgccgaagccatctccggcattccgtcctcctggcctggttat

SEQ ID NO: 32280 - DNA, 260 bp, Unknown
  Description of Unknown: RightRegion for integrase B6281 sequence
cacatcgtgtttgaccgcggaaacacaagtctcgatatgttcctaaagcttgtaatttagcgggtttcaaggcattatagggtattacaatacggtggtcccgatggcgaaatgggagcttccatgcgctatctggcccagcggttttcttttgcaaatccgcggattgccggtgtacttactgacatcggaaccgaggaacttgctcacctcgaaatgattggtgcgattgtccgccagctgacacgcggactttccgc

SEQ ID NO: 32281 - DNA, 260 bp, Unknown
  Description of Unknown: RightRegion for integrase B6282 sequence
agccctgcctacaaatactcattcgaactaatgatattatcgagtgagattaacctctgattttcagaggtttttttgtatttatacataaaaaagaagccaggcattgcacctggctttactctattctttaggttttgtatatgtcaatgcttgttcactgtctgcaactccacttgtagttggatccgtcactgcattgaatacactgactacaactaatccaagaacataaggattactcaatgcacccattagta

SEQ ID NO: 32282 - DNA, 109 bp, Unknown; identical to SEQ ID NO: 32213
  Description of Unknown: RightRegion for integrase B6283 sequence

SEQ ID NO: 32283 - DNA, 260 bp, Unknown
  Description of Unknown: RightRegion for integrase B6284 sequence
aagattatctacgatcgtaagaatgattctcttaaaatctactttttcttatacaggtaaaatgcccgcaagcccagtaaaatcaagaacttgcgtgtactttataggttataacaatttggttgacccaatggggatccaaatccttaggcgaccagggctattcccctatcgaaattctccgttactactacggtgacgacatgtacattaacaccgccgaagccatctccggcatcccatcctcctggcctggctat

SEQ ID NO: 32284 - DNA, 260 bp, Unknown
  Description of Unknown: RightRegion for integrase B6285 sequence
gatcttgatggtgaaaacatagacattcattggagctttgctcctggggaatcggaataaataaaggccgcccatgctgggcggccttttcgcttaatttgcggaatcactgaatttacgcgcggttttcgctgacttttcgcaaaatgcgcggataacgcgattttgttgacgtcgccaaaatcgggatgttttcgcggcgtcacgaaaacatggagcggttacgggtccacccgtgtataacaaacgcaagcctccac

SEQ ID NO: 32285 - DNA, 109 bp, Unknown
  Description of Unknown: RightRegion for integrase B6286 sequence
aaaattatctacgatcgcaagaacgattctctcaaaatctactttttcttatacaggtaaaatacccgcaagccaagtaaaatcaagggtttgcgggtactttataggt

SEQ ID NO: 32286 - DNA, 109 bp, Unknown; identical to SEQ ID NO: 32208
  Description of Unknown: RightRegion for integrase B6287 sequence

SEQ ID NO: 32287 - DNA, 260 bp, Unknown
  Description of Unknown: RightRegion for integrase B6288 sequence
aagattatctatgatcgcaagaacgattctctcaaaatctactttttcttatacaggtaaaatacccgcaaacccttgattttacttggcttgcgggtactttataggttatgacaatttggttgacacaatggggttccaaatcattaggcgatcagggctactcccctatcgaaatcctgcgctattattatggtgatgacatgtacatcaacaccgccgaagccatctccggcattccgtcctcctggcctggttat

SEQ ID NO: 32288 - DNA, 260 bp, Unknown
  Description of Unknown: RightRegion for integrase B6289 sequence
gccgccaaagatgccccagaaggcaatggttcggatttgggttgcttcgctccaccatgaaaaaagaacgccatttcgttaggaattggcgttcttttctttgtcatggtaacgtttttggtaacactattaagttttcagactgctctcaccagtgcattatacaacatctcaatgaactgcaccgcgctgggcgcaccggtcagcggatagcctgccagctgctgcacatactccgggtttgtgagccatgcaccttt

SEQ ID NO: 32289 - DNA, 260 bp, Unknown
  Description of Unknown: RightRegion for integrase B6290 sequence
cgaaccgaggtgtgcgccgtcggcacagtcatcttcgttaggataccacgagcggcctaggagacaaccaggcgcatgccgggatagatcaggttcgggtttgagataccgttcttggcggcgagatcctggtaggtcgtgccgtacttggaggcgatgccggaaagggtgtcgccgctctggacaacgtagacctgctcggtagtggcctgcccgttgatgatcgccataacctcgtcgtagcgcggccccagtacggc

SEQ ID NO: 32290 - DNA, 260 bp, Unknown
  Description of Unknown: RightRegion for integrase B6291 sequence
gaaattatatataacaagaaagaaaattcacttataataacttttaacgaattatcataaaaagcaagtcgtatgacctgcttttattattatttttaacacttacaccaaataggattaacatcaatgatgtctggatgcattttttcttctatgattttagcagcttccacaaaagaatttatatcacttccaaatatttgctgactaattggtctttcatcatcattcattttaagtagttcaaaagtcttttcatt

SEQ ID NO: 32291 - DNA, 260 bp, Unknown
  Description of Unknown: RightRegion for integrase B6292 sequence
cacatcgtgtttgaccgcggaaacacaagtctcgatatgttcctaaagcttgtaatttagcgggtttcaaggcattatagggtattacaatacggtggtcccgatggcgaaatgggagcttccatgcgttatctggcccagcggttttcttttgcaaatccgcggattgccggtgtacttactgacattggaaccgaggaacttgctcacctcgaaatgattggtgcgattgtccgccagctgacacgcggactttccgc

SEQ ID NO: 32292 - DNA, 260 bp, Unknown
  Description of Unknown: RightRegion for integrase B6293 sequence
cgaacccaggtattggccctcggtcgttccgtgttcatcaggttttctcgggccgcctaaaatagcaactactgaaaaaggggaggccccgcgaggagcctcccctttgttttggctatcccaccaccagcacttggccggggtagatcacgttcgggttcgccaatccgttcgccttggccagcgtccggtagtccgtgccgtacttggcggcgatgcccgagagcgtgtcgccgctcttgaccgtgtaggtcttcttg

SEQ ID NO: 32293 - DNA, 260 bp, Unknown
  Description of Unknown: RightRegion for integrase B6294 sequence
cacatcgtgtttgaccgcggaaacacaagtctcgatatgttcctaaagcttgtaatttagcgggtttcaaggcattatagggtattacaatacggtggtcccgatggcgaaatgggtgcttccatgcgctatctggcccagcggttttcttttgcaaatccgcggattgccggtgtacttaccgacatcggaaccgaggaacttgctcacctcgaaatgattggtgcgattgttcgccagctgacgcgcggactttccgc

SEQ ID NO: 32294 - DNA, 109 bp, Unknown
  Description of Unknown: RightRegion for integrase B6295 sequence
aaaattatctacgatcgcaagaacgattctcttaaaatcttctttttcctatacaggtaaaatacccgcaagcccagtaaaatcaaaggtttgcgggcactttataggt

SEQ ID NO: 32295 - DNA, 260 bp, Unknown; identical to SEQ ID NO: 32206
  Description of Unknown: RightRegion for integrase B6296 sequence

SEQ ID NO: 32296 - DNA, 260 bp, Unknown
  Description of Unknown: RightRegion for integrase B6297 sequence
aagattatctacgatcgcaaaaacgattctctcaaaatctactttttcttatacaggtaaaatgcccgcaaacccagtaaaatcaagagtttgcgtgtactttataggttatgacaatttggttgacccaatggggatccaaatccttaggcgaccagggctattcccctatcgaaattctccgttactactacggtgacgacatgtacattaacaccgccgaagccatctccggcatcccatcctcctggcctggctat

SEQ ID NO: 32297 - DNA, 109 bp, Unknown
  Description of Unknown: RightRegion for integrase B6298 sequence
aagattatatatgataaagagtcagattctttgaaaatttatttttttctatgtcgttaagaatgcccgcaaccccagtaaaatcaatggtttgcgggcactttatacg

SEQ ID NO: 32298 - DNA, 260 bp, Unknown
  Description of Unknown: RightRegion for integrase B6299 sequence
aagattatctacgatcgcaagaacgattctcttaaaatctactttttcctatacaggtaaaatacccgcaatcccagtaaaatcaagggtttgcgggtactttataggttataacaatttggttgacccaatggggatccaaatccttaggcgaccagggctattcccctatcgaaattctccgttactactacggtgacgacatgtacattaacaccgccgaagccatctccggcatcccatcctcctggcctggctat

SEQ ID NO: 32299 - DNA, 260 bp, Unknown
  Description of Unknown: RightRegion for integrase B6300 sequence
tatgatcgctcaaaagatgagctgaaagtttattactactatgcgccggaatcccagtaaaatcaagggttttcgcagttttgtaggttataacaaaaaggtcaaccaattcggacagctcaccattttcccgtcacaatactgtgtcaatatcggctgccgcacgttcggtcttgaaagataatttgcaaacaattcatctacgatcacggaaatgctttcatatacatttctttccggtatccacttatgatcgaatg

SEQ ID NO: 32300 - DNA, 109 bp, Unknown
  Description of Unknown: RightRegion for integrase B6301 sequence
aagatcatttatgataaagagtcggattctttgaaaatttatttttttctatgtcgttaagaatgcccgcaaacccagtaaaatcaagggtttgcgggcactttatacg

SEQ ID NO: 32301 - DNA, 109 bp, Unknown
  Description of Unknown: RightRegion for integrase B6302 sequence
aagattatttatgataaagagtcagattctttgaaaatttatttttttctatgtcgttaagaatgcccgcaagcccttgattttactgggtttgcgggcactttatacg

SEQ ID NO: 32302 - DNA, 260 bp, Unknown
  Description of Unknown: RightRegion for integrase B6303 sequence
aagattatctacgatcgtaagaatgattctcttaaaatctactttttcttatacaggtaaaatgcccgcaagcccagtaaaatcaagggtttgcgggtgctttataggttgtgacaatttggttgacccaatggggatccaaatccttaggcgaccagggctattcccctatcgaaattctccgttactactacggtgacgacatgtacattaacaccgccgaagccatctccggcatcccatcctcctggcctggctat

SEQ ID NO: 32303 - DNA, 260 bp, Unknown; identical to SEQ ID NO: 32206
  Description of Unknown: RightRegion for integrase B6304 sequence

SEQ ID NO: 32304 - DNA, 109 bp, Unknown
  Description of Unknown: RightRegion for integrase B6305 sequence
attttaatagatagggtccttatttataacgaccaaataaccgtaaaatggaagtattgatatacttccattttgtttccaaagtatccacatcccactgtatagcata

SEQ ID NO: 32305 - DNA, 260 bp, Unknown
  Description of Unknown: RightRegion for integrase B6306 sequence
aagattatctacgatcgcaagaacgattctctcaaaatctactttttcttatacaggtaaaatgcccgcaaacccagtaaaaccaaaggtttgcgggtactttataggttgtgacaatttggttgacccaatggggatccaaatccttaggcgaccagggctattcccctatcgaaattctccgttactactacggtgacgacatgtacattaacaccgccgaagccatctccggcatcccatcctcctggcctggctat

SEQ ID NO: 32306 - DNA, 260 bp, Unknown
  Description of Unknown: RightRegion for integrase B6307 sequence
gatcttgatggtgaaaacatagacattcattggagctttgctcctggggaatcggaataaataaaggccgcccagcatgggcggccttttcgcttaatttgcggaatcactgaatttacgcgcggttttcgctgacttttcgctgacttttcgcaaaatgcgcggataacgcgattttgttgacgtcgccaaaatcgggatgttttcgcggcgtcacgaaaacatggagcggttacgggtccacccgtgtataacaaacg

SEQ ID NO: 32307 - DNA, 109 bp, Unknown
  Description of Unknown: RightRegion for integrase B6308 sequence
cacatcgtgttcaatcgtaagaatacaagccttgatgtgttcctaaagcttgtagtttagcggtttctgaccgttatagggtattgcagtaccgaccgccatactgact

SEQ ID NO: 32308 - DNA, 109 bp, Unknown; identical to SEQ ID NO: 32205
  Description of Unknown: RightRegion for integrase B6309 sequence

SEQ ID NO: 32309 - DNA, 260 bp, Unknown
  Description of Unknown: RightRegion for integrase B6310 sequence
aagattatctacgatcgcaagaacgattctctcaaaatctactttttcttatacaggtaaaatacccgcaagccaagtaaaatcaaaggtttgcgggtactttataggttatgacaatttggttgacccaatggggatccaaattcttaggcgaccagggctattcccctatcgaaattctccgttactactacggtgacgacatgtacattaacaccgccgaagccatctccggcatcccatcctcctggcctggctat

SEQ ID NO: 32310 - DNA, 109 bp, Unknown
  Description of Unknown: RightRegion for integrase B6311 sequence
aagattatctacgatcgtaagaatgattctcttaaaatctactttttcttatacaggtaaaatgcccgcaagcccagtaaaatcaagggtttgcgggtgctttataggt

SEQ ID NO: 32311 - DNA, 260 bp, Unknown
  Description of Unknown: RightRegion for integrase B6312 sequence
cacatcgtgttcgatcgtaagaatacaagccttgatgtgttcctaaagcttgtagtttagcggtttctgatcgttatatggtattgcagtaccgaccgccatactgacttatgatataagacgcaagcttcgcattcggcgtgctgattttaatcggatactgcaatcgtttttcataactccacatagatcatcttcccccttcccaaggcatcggaccttcgttccagttccattcgtcagcattactctccccaaac

SEQ ID NO: 32312 - DNA, 109 bp, Unknown; identical to SEQ ID NO: 32300
  Description of Unknown: RightRegion for integrase B6313 sequence

SEQ ID NO: 32313 - DNA, 109 bp, Unknown; identical to SEQ ID NO: 32210
  Description of Unknown: RightRegion for integrase B6314 sequence

SEQ ID NO: 32314 - DNA, 109 bp, Unknown
  Description of Unknown: RightRegion for integrase B6315 sequence
aagattatctacgatcgcaagaacgattctcttaaaatctactttttcttatacaggtaaaatgcccgcaaacccagtaaaatcaagggtttgcgggtactttataggt

SEQ ID NO: 32315 - DNA, 260 bp, Unknown; identical to SEQ ID NO: 32233
  Description of Unknown: RightRegion for integrase B6316 sequence

SEQ ID NO: 32316 - DNA, 260 bp, Unknown
  Description of Unknown: RightRegion for integrase B6317 sequence
aagatcatttatgataaagagtcggattctttgaaaatttatttttttctatgtcgttaagaatgcccgcaaacccagtaaaatcaagggtttgcgggcactttatacgttattgaagttcggtggaccggattgcaaggacgtataaagtaaaattgatgtggtttctacctattaaatagcaaccgcacgatgacgattgaaataaaaggatctggtaatgctacagaaataatagcaaataactgggataatctccc

SEQ ID NO: 32317 - DNA, 260 bp, Unknown
  Description of Unknown: RightRegion for integrase B6318 sequence
accgctactatttcggatttagacttatcaagtccaccatacgacacaaatccaccgtaattttgatggaattacggtggattttttatataatctgttgtcaaaaaggttatgtaatgaattggctattacattgttaaatgatactgtcaggatttgcgaagaaaccatgggcgaaaaagttctataatctgctatccggttctttaccatacgacgaaaagacacgctctgccgtgctggcagggcgtgtcttctta

SEQ ID NO: 32318 - DNA, 260 bp, Unknown; identical to SEQ ID NO: 32235
  Description of Unknown: RightRegion for integrase B6319 sequence

SEQ ID NO: 32319 - DNA, 260 bp, Unknown
  Description of Unknown: RightRegion for integrase B6320 sequence
aagattatatatgataaagagtcagattctttgaaaatttatttttttctatgtcgttaagaatgcccgcaaacccagtaaaatcaagggtttgcgggcactttatacgttattgaagttcggtggaccggattgtaaggacgtataaagtaaaatcaatgcagttccttcctattttaataatgcactatcctacatacacttttccaccataccttgcagcaatccagccggatggaatctgcatccagatatcgttt

SEQ ID NO: 32320 - DNA, 201 bp, Unknown
  Description of Unknown: RightRegion for integrase B6321 sequence
aagattatctacgatcgcaagaacgattctctcaaaatctactttttcttatacaggtaaagtatccgcaaacccagtaaaaccaagggtttgcgggtactttataggttgtgacaatttggttgacccaatggggatccaaatccctaggcgaccagggctattcccctatcgaaattctccgttactactacggtgacg

SEQ ID NO: 32321 - DNA, 260 bp, Unknown
  Description of Unknown: RightRegion for integrase B6322 sequence
aaaattatctacgatcgcaagaacgattctcttaaaatctactttttcctatacaggtaaaatacccgcaagcccagtaaaatcaaaggtttgcgggtactttataggttatgacaatttggatgacccaatggggatccaaatccttaggcgaccagggctattcccctatcgaaattctccgttactactacggtgacgacatgtacattaacaccgccgaagccatctccggcatcccatcctcctggcctggctat

SEQ ID NO: 32322 - DNA, 260 bp, Unknown
  Description of Unknown: RightRegion for integrase B6323 sequence
gatcttgatggtgaaaacatagacattcattggagctttgctcctggggaatcggaataaataaaggccgcccagcatgggcggccttttcgcttaatttgcggaatcgttgaatttacgcgcggttttcgctgacttttcgcaaaatgcgcggataacgcgattttgttgacgtcgccaaaatcggaatgttttcgcggcgtcacgaaaacatggagcggttacgggtctacccgtgtataacaaacgcaagcctccac

SEQ ID NO: 32323 - DNA, 260 bp, Unknown
  Description of Unknown: RightRegion for integrase B6324 sequence
cacatcgtgtttgaccgcggaaacacaagtctcgatatgttcctaaagcttgtaatttagcgggtttcaaggcattatagggtattacgatacggtggtcccgatggcgaaatgggagcttccatgcgctatctggcccagcggttttcttttgcaaatccgcggattgccggtgtacttaccgacatcggaaccgaggaacttgctcacctcgaaatgattggtgcgattgtccgccagctgacacgcggactttccgc

SEQ ID NO: 32324 - DNA, 260 bp, Unknown
  Description of Unknown: RightRegion for integrase B6325 sequence
aagattatctacgatcgtaagaatgattctcttaaaatctacttttttctgtataaatgatatattttaaatatcccacaagccaagtaaaatcaatggcttgcgggtactttataggttatgacaatttggttgacccaatggggatccaaatccttaggcgaccagggctattcccctatcgaaattctccgttactactacggtgacgacatgtacattaacaccgccgaagccatctccggcatcccatcctcctg

SEQ ID NO: 32325 - DNA, 109 bp, Unknown
  Description of Unknown: RightRegion for integrase B6326 sequence
ctggccaatccggtcaaggtgaagagttcgcataaagttcttatggtgaccccggagtgattcgaacactcgacacacggcttagaaggccgttgctctatccagctga

SEQ ID NO: 32326 - DNA, 260 bp, Unknown; identical to SEQ ID NO: 32283
  Description of Unknown: RightRegion for integrase B6327 sequence

SEQ ID NO: 32327 - DNA, 260 bp, Unknown; identical to SEQ ID NO: 32273
  Description of Unknown: RightRegion for integrase B6328 sequence

SEQ ID NO: 32328 - DNA, 260 bp, Unknown
  Description of Unknown: RightRegion for integrase B6329 sequence
gatcttgatggtgaaaacatagacattcattggagctttgctcctggggaatcggaataaataaaggccgcccatgctgggcggccttttcgcttaatttgcggaatcgctgaatttacgcgcggttttcgctgacttttcgcaaaatgcgcggataacgcgattttgttgacgtcgccaaaatcggaatgttttcgcggcgtcacgaaaacatggagcggttacgggtctacccgtgtataacaaacgcaagcctccac

SEQ ID NO: 32329 - DNA, 260 bp, Unknown
  Description of Unknown: RightRegion for integrase B6330 sequence
aagatcatctacgatcgcaaaaacgattctctcaaaatctactttttcttatacaggtaaaatgcccgcaaacctagtaaaatcaagggtttgcgggtgctttataggttataacaatttggttgacccaatggggatccaaatccttaggcgaccagggctattcccctatcgaaattctccgttactactacggtgacgacatgtacattaacaccgccgaagccatctccggcatcccatcctcctggcctggctat

SEQ ID NO: 32330 - DNA, 260 bp, Unknown
  Description of Unknown: RightRegion for integrase B6331 sequence
aaaattatctacgatcgcaagaacgattctcttaaaatctactttttcctatacaggtaaaatacccgcaagcccagtaaaatcaagggtttgcgggtactttataggttataacaatttggttgacccaatggggatccaaatccttaggcgaccagggctattcccctatcgaaattctccgttactactacggtgacgacatgtacattaacaccgccgaagccatctccggcatcccatcctcctggcctggctat

SEQ ID NO: 32331 - DNA, 260 bp, Unknown
  Description of Unknown: RightRegion for integrase B6332 sequence
cacatcgtattcgacaggaagaacacaagtcttgatgtgttcttaaagcttgtaatttagcggtttctatccgttatagggtattgcagtaccgacctccatataccaatagcctacaatataaataggaaggaactgttccgttttgttccttcctattctaccgtaaaacccatcatatttctacacaaaattatagcttgtccaagaactctttcttccacttcttatcgtcggtccagtatgctggacaaggcttt

SEQ ID NO: 32332 - DNA, 260 bp, Unknown
  Description of Unknown: RightRegion for integrase B6333 sequence
aagattatttatgataaagagtcagattctttaaaaatttatttttttctatgtcgttaaaaatgcccgcaaacccagtaaaatcaagggtttgcgggcactttatacgttattgaagttcggtggaccggatggagaattaggagcttctttgagatatttttctcagagatataccatgccttataatgaagtaattggcacactaacagacattgctaccgaagaatttgcccatatggaaatcatatgcgccattg

SEQ ID NO: 32333 - DNA, 145 bp, Unknown
  Description of Unknown: RightRegion for integrase B6334 sequence
cacatcgtgtttgaccgcagaaacacaagtctcgatatgttcctaaagcttgtaatttagcgggtttcaaggcattatagggtattacaatacggtggtcccgatggcgaaatgggagcttccatgcgctatctggcccagcggt

SEQ ID NO: 32334 - DNA, 260 bp, Unknown
  Description of Unknown: RightRegion for integrase B6335 sequence
aagattatctacgatcgcaagaacgattctctcaaaatctactttttcttatacaggtaaaatgcccgcaaccacagtaaaatcaagggtttgcgtgtactttataggttataacaatttggttgacccaatggggatccaaatccctaggcgaccagggctattcccctatcgaaattctccgttactactacggtgacgacatgtacattaacaccgccgaagccatctccggcatcccatcctcctggcctggctat

SEQ ID NO: 32335 - DNA, 260 bp, Unknown
  Description of Unknown: RightRegion for integrase B6336 sequence
aagattatctacgatcgcaagaacgattctcttaaaatctactttttcctatacaggtaaaatgcccgcaagcccagtaaaatcaagagtttgcgggtgctttataggttgtgacaatttggttgacccaatggggatccaaatccttaggcgaccagggctattcccctatcgaaattctccgttactactacggtgacgacatgtacattaacaccgccgaagccatctccggcatcccatcctcctggcctggctat

SEQ ID NO: 32336 - DNA, 260 bp, Unknown; identical to SEQ ID NO: 32252
  Description of Unknown: RightRegion for integrase B6337 sequence

SEQ ID NO: 32337 - DNA, 134 bp, Unknown
  Description of Unknown: RightRegion for integrase B6338 sequence
aagattatctacgatcgcaagaacgattctctcaaaatctactttttcttatacaggtaaaatacccgcaaacccagtaaaatgatatgctccccatatggtagacaatggaaatatccaaaaatctatcatat

SEQ ID NO: 32338 - DNA, 260 bp, Unknown
  Description of Unknown: RightRegion for integrase B6339 sequence
gaaaagatgtgctaccggaagcaaagttccgatatgtcgttgcacatcgattttttatgactttatatgtacaagtacgatatagtgtcaaagcacgatatgcttcttgtacatataaaaaaccgccaaaagcgtgtgctttgcacacgaatagcctgattttttgtttattgttcaatatgtacaagtcctatacgcttgttttgtgcaagtatacaaaagtgttccaattgtcataaaacgcttgacaaaagttcccg

SEQ ID NO: 32339 - DNA, 109 bp, Unknown
  Description of Unknown: RightRegion for integrase B6340 sequence
aagattatctacgatcgcaagaacgattctcttaaaatctactttttcctatacaggtaaagtacacgcaaacccagtaaaatcaagagcttgcgtgtactttataggt

SEQ ID NO: 32340 - DNA, 109 bp, Unknown
  Description of Unknown: RightRegion for integrase B6341 sequence
aagattatctacgatcgcaagaacgattctctcaaaatctactttttcttatacaggtaaaatgcccgcaaacccagtaaaatcaagagtttgcgtgtactttataggt

SEQ ID NO: 32341 - DNA, 260 bp, Unknown
  Description of Unknown: RightRegion for integrase B6342 sequence
aagattatctacgatcgcaagaacgattctcttaaaatctactttttcctatacaggtaaaatgcccgcaagcccagtaaaatcaagggtttgcgtatactttataggttatgacaatttggttgacccaatggggatccaaatccttaggcgaccagggctattcccctatcgaaattctccgttactactacggtgacgacatgtacattaacaccgccgaagccatctccggcatcccatcctcctggcctggctat

SEQ ID NO: 32342 - DNA, 260 bp, Unknown
  Description of Unknown: RightRegion for integrase B6343 sequence
aaaattatctacgatcgcaagaacgattctcttaaaatctactttttcctatacaggtaaaatacccgcaagcccagtaaatgtgagggtttggtaaggatgtttttaagatttaggttttgcggtatagtatgttgcgtactataccgcttttcctttccacaaagtgacctttgagtggtcgaatactccgatatggttatagataatttcaatttcctgtaagcgtttaccgctgctcttatcaggagcatggacaa

SEQ ID NO: 32343 - DNA, 109 bp, Unknown
  Description of Unknown: RightRegion for integrase B6344 sequence
aagatcatttatgataaagagtcagattctttgaaaatttatttttttctatgtcgttaagaatgcccgcaaacccagtaaaatcaagggtttgcgggcactttatacg

SEQ ID NO: 32344 - DNA, 260 bp, Unknown
  Description of Unknown: RightRegion for integrase B6345 sequence
cacatcgtgtttgaccgcggaaacacaagtctcgatatgttcctaaagcttgtaatttagcgggtttcaaggcattatagggtattacgatacggtggtcccgatggcgaaatgggagcttccatgcgctatctggcccagcggttttcttttgcaaatccgcggattgccggtgtacttactgacatcggaaccgaggaacttgctcacctcgaaatgattggtgcgattgtccgccagctgacgcgcggactttccgc

SEQ ID NO: 32345 - DNA, 260 bp, Unknown
  Description of Unknown: RightRegion for integrase B6346 sequence
aaaattatctatgatcgtaagaatgattctcttaaaatctactttttcttatacaggtaaaatgcccgcaaacccagtaaaaatcaagagcttgcgtgtactttataggttataacaatttggttgacacaatggggatccaaatcattaggcgatcagggctactcccctatcgaaatcctacgctattattatggtgatgacatgtacatcaacaccgccgaagccatctccggcattccgtcctcctggcctggtta

SEQ ID NO: 32346 - DNA, 109 bp, Unknown
  Description of Unknown: RightRegion for integrase B6347 sequence
cacatcgtgtttgaccgcgaaaacacaagtctcgatatgttcctaaagcttgtaatttagcgggtttcaaggcattatagggtattacagtacggtggtcccgatggcg

SEQ ID NO: 32347 - DNA, 260 bp, Unknown
  Description of Unknown: RightRegion for integrase B6348 sequence
cttatagaaaaggtgtctatcgactataaaaacaatatcacaatcgcctggaaggtttgattttactgcacttcactttagtgtctattgttgatacgttaggcactaaagtgcatagctgatatattgatataacattatccacaaagtcaaattttatataaaaaaatatatacattctcttatttaaacattataattaatttaaagaaatataggtgaatattattcttatagaaggtgaacatatgagtactccg

SEQ ID NO: 32348 - DNA, 260 bp, Unknown
  Description of Unknown: RightRegion for integrase B6349 sequence
aagattatttatgataaagagtcagattctttaaaaatttatttttttctatgtcgttaaaaatgcccgcaaacccagtaaaatcaagggtttgcgggcactttatacgttattgaagttcggtggaccggatggagaattaggagcttctttgagatatttttctcagagatataccatgccttataatgaagtaattggcacactaacagacattgctaccgaggaatttgcccatatggaaatcgtatgcgccattg

SEQ ID NO: 32349 - DNA, 109 bp, Unknown
  Description of Unknown: RightRegion for integrase B6350 sequence
aagattatttatgataaagagtcagattctttgaaaatttatttttttctatgtcgttaagaatgcccgcaaacccttgattttactgggtttgcgggcactttatacg

SEQ ID NO: 32350 - DNA, 260 bp, Unknown; identical to SEQ ID NO: 32245
  Description of Unknown: RightRegion for integrase B6351 sequence

SEQ ID NO: 32351 - DNA, 109 bp, Unknown; identical to SEQ ID NO: 32210
  Description of Unknown: RightRegion for integrase B6352 sequence

SEQ ID NO: 32352 - DNA, 260 bp, Unknown
  Description of Unknown: RightRegion for integrase B6353 sequence
aaaattatctacgatcgcaagaacgattctcttaaaatctactttttcctatacaggtaaaatacccgcaagcccagtaaaatcaaaggtttgcgggtactttataggttatgacaatttggttgacccaatggggatccaaatccctaggcgaccagggctattcccctatcgaaattctccgttactactacggtgacgacatgtacattaacaccgccgaagccatctccggcatcccatcctcctggcctggctat

SEQ ID NO: 32353 - DNA, 100 bp, Unknown
  Description of Unknown: RightRegion for integrase B6354 sequence
cacatcgtgtttgaccgcggaaacacaagtctcgatatgttcctaaagcttgtaatttaacgggtttcaaggcattatagggtattacgatacggtggtc

SEQ ID NO: 32354 - DNA, 260 bp, Unknown
  Description of Unknown: RightRegion for integrase B6355 sequence
gaaaagatagtatttgaccgggaaacccggagttttacgttcttttactacacatcataagttattacaatacggcggccccgacggcgagatgggcgcatccatgcgctatctgtcccagcgctacgccatgccttataaagaaggcaaggctgttttgaccgatatcggcacagaggaattggcacatctggaaatgatcgccgccattgtccatcagctgacccggaacctcacagccgagcagctggtagaacagg

SEQ ID NO: 32355 - DNA, 260 bp, Unknown
  Description of Unknown: RightRegion for integrase B6356 sequence
gaaaagaccgagcgcggcacgggattgaacccacgcctgcgcgtaactctcagagtctaaatgtttatcatcttgtgccagatttatagggcacgcgatgataaacagacagagaacatagacaaacataggcggatagcgtagtgctacccgccttttttgtgcttagcttacccgcttccacatgaacacgaccagatatggaggaaggttgttgtgtggcttgccgccgccagtcgaacccgtcacgccaccttggt

SEQ ID NO: 32356 - DNA, 260 bp, Unknown
  Description of Unknown: RightRegion for integrase B6357 sequence
gaaaagaccgagcgcggcacggggttgaacccacgcctgcgcgtaaccctcaaaatctaatgtttatcatcttgtacccgatttatagggcacgcgatgataaacagactacaaaacttataaatgtataaaaacgggggaacctgcaagacaagcgggttcccctttttcgcgtcatgccgtccgtttccacatgtagaccaccaaatatggtggcatattattatgcggctgggaaccgccagcgtacatcgtctgaa

SEQ ID NO: 32357 - DNA, 260 bp, Unknown
  Description of Unknown: RightRegion for integrase B6358 sequence
gaaaagaccgaacgcggcacgggattgaacccacgcctgcgcgtaactctcaaaatctaatgtttatcatcttgtgactgatttatagggcacgcgatgataaacagacttacaaaacttacaaggcggatagctcaagggctacccgcctttttattatgtgctcaacttacccgtttaaacatgtacacagtcaaatatggcggcatattattatgtgccttgccgccgcctgcatacatggtctgtacgttgccgcc

SEQ ID NO: 32358 - DNA, 260 bp, Unknown
  Description of Unknown: RightRegion for integrase B6359 sequence
gaaaagaccgagcgcggcacgggattgaacccacgcctgcgcgtaactctcagaatctaaatgtttatcatcttgtgccagatttatagggaacgcgatgataaacagacagagaatatagacaaacataggcggatagcgtagtgctacccgccttttttgtgcttagcttacccgcttccacatgaacacgaccagatatggaggaaggttgttgtgcggcttgccgccgccagtagcccccgtcacgccgccttggt

SEQ ID NO: 32359 - DNA, 139 bp, Unknown
  Description of Unknown: RightRegion for integrase B6360 sequence
tataaacgtgaaaaatccgctcccgagggcgatattttcttgaaaatctattataaataactttttacccgccttatgtatcttgttgccatagctgtatagataacaacaagatacccaaccaaaaagaacataagca

SEQ ID NO: 32360 - DNA, 260 bp, Unknown
  Description of Unknown: RightRegion for integrase B6361 sequence
ctgattgataaagttgtagtcctcaatacagatgtcaccatttactggtctttctgctgatcatcctttaataccagcctgcagatagtttctacatttgcggtccaggggaactggtccacagcgcaggctttctctaccacatagccgccagccaggaaaacttccaagtctcttaccagactggtcggtttgcatgaaatgtaaatgatagttttacacctaatagtggcaatgatcttaacgaatgcttctattag

SEQ ID NO: 32361 - DNA, 109 bp, Unknown
  Description of Unknown: RightRegion for integrase B6362 sequence
tataaacgtgaaaaatccgctcccgagggcgatattttcttaaaaatctattataaataactttttacccaccttatgtatcttgttgccatagctgtcgccatagcaa

SEQ ID NO: 32362 - DNA, 260 bp, Unknown
  Description of Unknown: RightRegion for integrase B6363 sequence
gaaaagatagtatttgaccgggaaacccggagttttacgttcttttactacacatcataagttattacaatacggcgggccagaatgtcataacttatgatgtttattcctaatataaagggtgactgccaaaaacataggtgaattgaaaaagtaaattccgctttgcaagattaaattccactttgaaaagataaattctacccaaatacagaaaaaatgagattttatatatgaaatacccagaatcagagttaaaa

SEQ ID NO: 32363 - DNA, 109 bp, Unknown
  Description of Unknown: RightRegion for integrase B6364 sequence
tataaacgtgaaaaatccgctcccgagggcgatatcttcttgaaaatctattataaataactttttacccgccttatgtatcttgttgccatagctgtcgccatagcaa

SEQ ID NO: 32364 - DNA, 260 bp, Unknown
  Description of Unknown: RightRegion for integrase B6365 sequence
tataaacgtgaaaaatccgctcccaagggcgatattttcttgaaaatctattataaataactttttacccaccttatgtatcttgttgccatagctgtcgccatagcaatccataatattccggaaggaattgctacatctgtaccgatatactactcaacaggcagcagaaaaagagcatttatagtatcgtttttttcgggtattacggaacctttaggtgctataatcggttatttaattttacgtccgtttttcaa

SEQ ID NO: 32365 - DNA, 260 bp, Unknown
  Description of Unknown: RightRegion for integrase B6366 sequence
tataaacgtgaaaaatccgctcccgagggcgatattttcttgaaaatctattataaataactttttatccatcttatgtatcttgttgccatagctgtcgccatagcaatccataatattccggaaggaattgctacttctgtaccgatatactactcaacaggcagcagaaaaagagcatttatagtatcgtttttttcgggtattacggaacctttaggtgctataatcggttatttaattttacgtccgtttttcaa

SEQ ID NO: 32366 - DNA, 260 bp, Unknown
  Description of Unknown: RightRegion for integrase B6367 sequence
gaaaagaccgagcgcggcacaggattgaacccacgcctgcgcgtaactctcagaatctaaatgtttatcatcttgtgccagatttatatggcacaagatgataaacagacagagaatatagacaaacataggcggatagcgtagtgctacccgccttttttgtgcttagcctacacgcttccacatgaacacgaccagatatggaggaaggttgttgtgtggcttgccgccgccagtcgcctccgtcgagctgccttggt

SEQ ID NO: 32367 - DNA, 260 bp, Unknown
  Description of Unknown: RightRegion for integrase B6368 sequence
gaaaagaccgagcgcggcacgggattgaacccacgcctgcgcgtaactctcagaatctaaatgtttatcatcttgtgcccgatttatagggcacgcgatgataaacagacagagaatatagacaaacataggcggatagcccgacggctacccgcctttttatgttgcagaaacacaagatgtgggggcgcatcaataggtgtatacaacatatagggggaaaccgctcggttccccccttttttcgcgctaaatgcccc

SEQ ID NO: 32368 - DNA, 260 bp, Unknown
  Description of Unknown: RightRegion for integrase B6369 sequence
tataaacgtgaaaaatccgctcccgagggcgatattttcttgaaaatctattataaataactttttatccatcttatgtatcttgttgccatagctgtcgccatagcaatccataatattccggaaggaattgctacgtctgtaccgatatactactcaacaggcagcagaaaaagagcatttatagtatcgtttttttcgggtattacggaacctttaggtgctataatcggttatttaattttacgtccgtttttcaa

SEQ ID NO: 32369 - DNA, 260 bp, Unknown
  Description of Unknown: RightRegion for integrase B6370 sequence
agaaccgagatctgcgccgttgggaccgtcgtgctgctcaggataccacgggcggcgtagcaacaccttttctcgagaaaaaacccgcccgggataacccgagcgggccgcggctagcgcccgttgatgctcacgaggcacaggccgattgtcgccacggtgccgccgaagagcgcgccgaggacgaaagccagcgcgatcatgctagtacgggttgccgtcggtgacgcagacttggagtcggtcgagcggctcgccgt

SEQ ID NO: 32370 - DNA, 260 bp, Unknown
  Description of Unknown: RightRegion for integrase B6371 sequence
agaatttgctcgacgtgtacccgctgctcgaaacggccgaggagaaaaacgctctcctaaaagaggtgctcgaaaaggtcgtctatcagaagctaaacgagaagcgcaaaaagagccctgacggctttaccattgagatatacccgcgcatcccaaaatccgaaaaatgaaaagagagggccgtttcggtcctctctttcttatagttatcctgtttagccatactcatctttcatgccgtaaacactcagcatctctgc

SEQ ID NO: 32371 - DNA, 260 bp, Unknown
  Description of Unknown: RightRegion for integrase B6372 sequence
tataaacgtgaaaaatccgctcccaagggcgatattttcttgaaaatctattataaataactttttacccaccttatgtatcttgttgccatagctgtatggataacaacaagatacccaaccaaaaagaacataagcattttgcctatgttctttcttaattatataaggtttttaatatattttttagaaggatattcaatttattttaatattcaaatcttttagccggatatgtttttaataaatccatatctcga

SEQ ID NO: 32372 - DNA, 260 bp, Unknown
  Description of Unknown: RightRegion for integrase B6373 sequence
gaaaagaccgagcgcggcacgggattgaacccacgcctgcgcgtaactctcagaatctaaatgtttatcatcttgtgccagatttatagggcacgcgatgataaacagacagagaatatagacaaacataggcggatagcgtagtgctacccgccttttttgtgcttagcttacccgcttccacatgaacacgaccagatatggaggaaggttgttgtgtggcttgccgccgccagccgcctccgtcgagctgccttggt

SEQ ID NO: 32373 - DNA, 260 bp, Unknown
  Description of Unknown: RightRegion for integrase B6374 sequence
ctaactgataaagttgtggttctcaatgcagatgtcacgatttactggtctttctgctgatcctcctttaataccagcctgcagatagtttctacgttcgcagtccagggaaactggtccactgcgcaggctttctctaccacatacccgccggccagaaaaacttccaagtctcttaccaagctggtcggtttgcacgaaatgtaaatgattgttttacacctaatagtggcaatgatcttcggcagtgccttggggtg

SEQ ID NO: 32374 - DNA, 260 bp, Unknown
  Description of Unknown: RightRegion for integrase B6375 sequence
tataaacgtgaaaaatccgctcccgagggcgatattttcttgaaaatctattataaataactttttaaccaccttatgtatcttgttgccatagctgtcgccatagcaatccataatattccggaaggaattgctacgtctgtaccgatatactactcaacaggcagcagaaaaagagcatttatagtatcgtttttttcgggtattacggaacctttaggtgctataatcggttatttaattttacgtccgtttttcaa

SEQ ID NO: 32375 - DNA, 260 bp, Unknown
  Description of Unknown: RightRegion for integrase B6376 sequence
ataaaatctatcatttacaataaacgtgaagatactttaactactattttttatatttaaaaacgttgccttaaaatgcatttaggttctccaataggtggacacattgcagttgcttcaagcttcgtcattgtgtcacatggatgacatatatcacaaacacctgcattaggtgctttgaaaaatcttgtgtctgtatttgaacatttgctcataattccaaacctcctacatgtttgctaaggtgggtcataaaaatg

SEQ ID NO: 32376 - DNA, 122 bp, Unknown
  Description of Unknown: RightRegion for integrase B6377 sequence
gaaaagatagtatttgaccgggaaacccggagttttacgttcttttactacacatcataagttattacaatacggcggccccgacggcgagatgggcgcatccatgcgctatctgtcccagc

SEQ ID NO: 32377 - DNA, 260 bp, Unknown
  Description of Unknown: RightRegion for integrase B6378 sequence
tataaacgtgaaaaatccgctcccaagggcgatattttcttgaaaatctattataaataactttttacccaccttatgtatcttgttgccatagctgtcgccatagcaatccataatattccggaaggaattgctacgtctgtaccgatatactactcaacaggcagcagaaaaagagcatttatagtatcgtttttttcgggtattacggaacctttaggtgctataatcggttatttaattttacgtccgtttttcaa

SEQ ID NO: 32378 - DNA, 109 bp, Unknown
  Description of Unknown: RightRegion for integrase B6379 sequence
ctgattgataaagttgtggttctcaatgcagatgtcacgatttactggtctttctgctgatcctcctttaataccagcctgcagatagtttctacgttcgcagtccagg

SEQ ID NO: 32379 - DNA, 260 bp, Unknown
  Description of Unknown: RightRegion for integrase B6380 sequence
tataaacgtgaaaaatccgctcccgagggcgatattttcttgaaaatctattataaataactttttatccatcttatgtatcttgttgccatagctgttgccatagcaatccataatattccggaaggaattgctacgtctgtaccgatatactactcaacaggcagcagaaaaagagcatttatagtatcgtttttttctggtattacggaacctttaggtgctataatcggttatttaattttacgtccgtttttcaa

SEQ ID NO: 32380 - DNA, 260 bp, Unknown
  Description of Unknown: RightRegion for integrase B6381 sequence
tataaacgtgaaaaatccgctcccgagggcgatattttcttgaaaatctattataaataactttttatccaccttatgtatcttgttgccatagttgtcgccatagcaatccataatattccggaaggaattgctacgtctgtaccgatatactactcaacaggcagcagaaaaagagcatttatagtatcgtttttttcgggtattacggaacctttaggtgctataatcggttatttaattttacgtccgtttttcaa

SEQ ID NO: 32381 - DNA, 260 bp, Unknown
  Description of Unknown: RightRegion for integrase B6382 sequence
gaaaagaccgagcgcggcacgggattgaacccacgcctgcgcgtaactctcagaatctaaatgtttatcatcttgtgcccgatttatagggcacgcgatgataaacagacagagaatatagacaaacataggcggatagcgtagtgctacccgccttttttgtgcttagcttacccgcttccacatgtacacaacgagataaggcggcatattgttgtgcgacttgccgccgccagtcgcctccgtcgcgctgccttggt

SEQ ID NO: 32382 - DNA, 109 bp, Unknown; identical to SEQ ID NO: 32378
  Description of Unknown: RightRegion for integrase B6383 sequence

SEQ ID NO: 32383 - DNA, 260 bp, Unknown
  Description of Unknown: RightRegion for integrase B6384 sequence
acgaaagaatatacaaacgggagggcaggaaatgtcaatggaaaactgtgcaaacactaaacccaaaattacgattatcccagccaagacgagagtcgaacgacttgaccctttgtcaatagcgatggggcaaaagccaaaaatacgagtggctgcatacgcacgcgtgtcgaccgatcacgaagaacaggagagcagttacgaggcacaggtagaccacttcaccaaactcatagcaagccatgatgattggacgatgg

SEQ ID NO: 32384 - DNA, 260 bp, Unknown
  Description of Unknown: RightRegion for integrase B6385 sequence
ctaatagataagattgtggttcttaatcgcgatgtaactatctactggtcattctcttaagggcacagatagtctcaacatggtaagtgttgggaaacatatcgacgcaggctatcttttcaacgtgatagccgccttcctgcaatagcttcaggtctctcgcaaggcttgaaggcttgcaggaaatgtaaatcattctatctaccctaaacatatctattatcttgccgatagccttcggatgaattccatctcgtggc

SEQ ID NO: 32385 - DNA, 260 bp, Unknown
  Description of Unknown: RightRegion for integrase B6386 sequence
tataaacgcgaaaaatccgctcccgagggcgatattttcttgaaaatctattataaataactttttatccaccttatgtatctcgttgccatagctgtcgccatagcaatccataatattccggaaggaattgctacgtctgtaccgatatactactcaacaggcagcagaaaaagagcatttatagtatcgtttttttcgggtattacggaacctttaggtgctataatcggttatttaattttacgtccgtttttcaa

SEQ ID NO: 32386 - DNA, 260 bp, Unknown; identical to SEQ ID NO: 32385
  Description of Unknown: RightRegion for integrase B6387 sequence

SEQ ID NO: 32387 - DNA, 260 bp, Unknown
  Description of Unknown: RightRegion for integrase B6388 sequence
gaaaagaccgagcgcggcacgggattgaacccacgcctgcgcgtaactctcaaaatctaaatgtttatcatcttgtgccagatttatagggcacgcgatgataaacagacagagaatatagacaaacataggcggatagcgtagtgctacccgccttttttgtgcttagcttactctcttccacatgtacacaacgagatacggggggaggttgttgtgtggcttgccgccaccagtagcgccagtcacacttccctgat

SEQ ID NO: 32388 - DNA, 260 bp, Unknown
  Description of Unknown: RightRegion for integrase B6389 sequence
gaaaagaccgagcgcggcacgggattgaacccacgcctgcgcgtaactctcagaatctaaatgtttatcatcttgtgccagatttatagggcacaagatgataaacagacagagaatatagacaaacataggcggatagcgtaatgctacccgccttttttgtgcttagcttacccgcttccacatgtacaccacgaggtacggcggcatattgctgtgagccttgccaccaccagtcgagccagtcacgccaccttggt

SEQ ID NO: 32389 - DNA, 260 bp, Unknown
  Description of Unknown: RightRegion for integrase B6390 sequence
tataaacgtgaaaaatccgctcccgagggcgatattttcttgaaaatctattataaataactttttacccgccttatgtatcttgttgccatagctgtcgccatagcaatccataatattccggaaggaattgctacgtctgtaccgatatactactcaacaggcagcagaaaaagagcatttatagtatcgtttttttcgggtattacggaacctttaggtgctataatcggttatttaattttacgtccgtttttcaa

SEQ ID NO: 32390 - DNA, 260 bp, Unknown
  Description of Unknown: RightRegion for integrase B6391 sequence
tataaacgtgaaaaatccgctcccgagggcgatattttcttgaaaatctattataaataactttttacccaccttatgtatcttgttgccatagctgtcgccatagcaatccataatattccggaaggaattgctacgtctgtaccgatatactactcaacaggcagcagaaaaagagcatttatagtatcgtttttttcgggtattacggaacctttaggtgctataatcggttatttaattttacgtccgtttttcaa

SEQ ID NO: 32391 - DNA, 260 bp, Unknown
  Description of Unknown: RightRegion for integrase B6392 sequence
aaacagatcgtttttgaccgtgaaacccggcgttttatcttttattactacacatcataagttattgcattacgggccaccatactgactcataataaactgtgccaactttgcatttggttccttaatattaaccggaaactgcaggcgtttttcataaatccacattatacgttccccccttcccatggccatggatcgctgacccaggtccagtatgcgttctcaggaacgtttcccgcattcaaagggccaaactg

SEQ ID NO: 32392 - DNA, 260 bp, Unknown
  Description of Unknown: RightRegion for integrase B6393 sequence
ctgattgataaagttgtagtcctcaatacagatgtcaccatttactggtctttctgctgatcatcctttaataccagcctgcagatagtttctacatttgcggtccaagggaactggtccacagcgcaggctttctctaccacatagccgccagccaggaaaacttccaggtctcttaccagactggtcggtttgcatgaaatgtaaatgatagttttacacctaatagtggcaatgatcttcggcagtgccttggggtg

SEQ ID NO: 32393 - DNA, 260 bp, Unknown
  Description of Unknown: RightRegion for integrase B6394 sequence
ctgattgataaagttgtagtcctcaatacagatgtcaccatttactggtctttctgctgatcatcctttaataccagcctgcagatagtttctacatttgcggtccaggggaactggtccacagcgcaggctttctctaccacatagccaccagccaggaaaacttccaggtctcttaccaggctggtcggtttgcatgaaatataaatgatggttttacacctaatagtggcaatgatcttcggcagtgccttggggtg

SEQ ID NO: 32394 - DNA, 260 bp, Unknown
  Description of Unknown: RightRegion for integrase B6395 sequence
acgaaagaatatacaaacgggagggcaggaaatgtcaatggaaaactgtgcaaacactaaacccaaaattacgattatcccagccaagacgagagtcgaacgacttgaccctttgtcaatagcgatggggcaaaagccaaaaatacgagtggctgcatacgcacgcgtgtcgaccgaccacgaagaacaggagagcagttacgaggcacaggtagaccacttcaccaaactcatagcaagccatgatgattggacgatgg

SEQ ID NO: 32395 - DNA, 109 bp, Unknown
  Description of Unknown: RightRegion for integrase B6396 sequence
aaaaagatagtgttcgaccgggaaacccggcgttttacgttcttcttttacacctcataagttattgcagtttggcggccccgacggcgagatgggcgcatccatgcgc

SEQ ID NO: 32396 - DNA, 109 bp, Unknown
  Description of Unknown: RightRegion for integrase B6397 sequence
cacatcacgttcgatcgcaagaatacaagtcttgatatgttcctaaagctagtaatttagcgggtttcaaagcattatagggtattgcagtacggtggtcccgatggcg

SEQ ID NO: 32397 - DNA, 260 bp, Unknown
  Description of Unknown: RightRegion for integrase B6398 sequence
tataaacgtgaaaaatccgctcccgagggcgatattttcttgaaaatctattataaataactttttatccaccttatgtatcttgttgccatagttgtcgccatagcaatccataatattccggaaggaattgctacttctgtaccgatatactactcaacaggcagcagaaaaagagcatttatagtatcgtttttttcgggtattacggaacctttaggtgctataatcggttatttaattttacgtccgtttttcaa

SEQ ID NO: 32398 - DNA, 260 bp, Unknown; identical to SEQ ID NO: 32397
  Description of Unknown: RightRegion for integrase B6399 sequence

SEQ ID NO: 32399 - DNA, 260 bp, Unknown
  Description of Unknown: RightRegion for integrase B6400 sequence
gaaaagaccgagcgcggcacgggattgaacccacgcctgcgcgtaactctcagaatctaaatgtttatcatcttgtgcccgatttatagggcacaagatgataaacagacagagaatatagacaaacataggcggatagcgcaacggctacccgccttttttgtgcttagcttacacgcctccacatgtacacaacgagatacggggggaggttgttgtgtggcttgccgccaccagtagcttcagtcgcacttccctga

SEQ ID NO: 32400 - DNA, 260 bp, Unknown
  Description of Unknown: RightRegion for integrase B6401 sequence
tataaacgtgaaaaatccgctcccgagggcgatattttcttgaaaatctattataaataacttttacccgccttatgtatcttgttgccatagctgtcgccatagcaatccataatattccggaaggaattgctacgtctgtaccgatatactactcaacaggcagcagaaaaagagcatttatagtatcgtttttttcgggtattacggaacctttaggtgctataatcggttatttaattttacgtccgtttttcaac

SEQ ID NO: 32401 - DNA, 260 bp, Unknown
  Description of Unknown: RightRegion for integrase B6402 sequence
aaagctataggagaatttaaaaatataaaaaatttaggctatgtcacaacaaacagttgataaatagccatttttataggggagtatcagaactcccctacaaactgttatttgcagttatctatactcatttggaatttcgatatgaagtgtctcacacaataacttcacatcatgtgcatcattttcatcaaactcgtatcccagatggaacattacttgactatatggttcaatacaggaaacctctatttcctcaa

SEQ ID NO: 32402 - DNA, 260 bp, Unknown; identical to SEQ ID NO: 32392
  Description of Unknown: RightRegion for integrase B6403 sequence

SEQ ID NO: 32403 - DNA, 260 bp, Unknown
  Description of Unknown: RightRegion for integrase B6404 sequence
gcaatacgtggagtaattagtaaacttacttgggatggagagaacataataatttcataactatttaaagacacctcgtactcctggtgcccctattgcaaacacccctaataatactataaacaatatcatagttggtaaactaggaatcttaccatataaaatttgagatactgtcattacaaaaaatacttctgtaagaactgaaccacataaatgtatgtttgaacataatggtattgcaaaatccactatatctt

SEQ ID NO: 32404 - DNA, 260 bp, Unknown
  Description of Unknown: RightRegion for integrase B6405 sequence
gaaaagaccgagcgcggcacgggattgaacccacgcctgcgcgtaactctcagaatctaaatgtttatcatcttgtgccagatttatagggcacgcaatgataaacagacagagaacatagacaaacataggcggatagcgtagtgctacccgccttttttatgcttagcttacccgcttccacatgaacacgaccagatatggaggaaggttgttgtgtggcttgccgccgccagtcgcctccgtcgagctgccttggt

SEQ ID NO: 32405 - DNA, 260 bp, Unknown; identical to SEQ ID NO: 32380
  Description of Unknown: RightRegion for integrase B6406 sequence

SEQ ID NO: 32406 - DNA, 260 bp, Unknown; identical to SEQ ID NO: 32380
  Description of Unknown: RightRegion for integrase B6407 sequence

SEQ ID NO: 32407 - DNA, 260 bp, Unknown
  Description of Unknown: RightRegion for integrase B6408 sequence
aaacgtatcgaggtactaccggatccggactctataaaaatatattggaaattcgtctaagcctgtaaccgcaaggcttagagagttttaccctaattgtgggcatggtttcaaccgtatccacgatttaggtaaataattttcggttttcttcctatttatatggagtatgcacattttcgatatttttaaaactattttcgatttttcgatatttgttattgacttttcgaaaattcggtagtataataaagacagtt

SEQ ID NO: 32408 - DNA, 260 bp, Unknown
  Description of Unknown: RightRegion for integrase B6409 sequence
tataaacgtgaaaaatccgctcccgagggcgatattttcttaaaaatctattataaataactttttacccaccttatgtatcttgttgccatagctgtcgccatagcaatccataatattccggaaggaattgctacgtctgcaccgatatactactcaacaggcagcagaaaaagagcatttatagtatcgtttttttcgggtattacggaacctttaggtgctataatcggttatttaattttacgtccgtttttcaa

SEQ ID NO: 32409 - DNA, 260 bp, Unknown
  Description of Unknown: RightRegion for integrase B6410 sequence
gaaaagaccgagcgcggcacgggattgaacccacgcctgcgcgtaactctcagaatctaaatgtttatcatcttgtgccagatttatagggaacgcgatgataaacagacagagaatatagacaaacataggcggatagcgtagtgctacccgccttttttgtgcttagcttacccgcttccacatgaacacgaccagatctggaggaaggttgttgtgcggcttgccgccgccagtagcccccgtcacgccgccttggt

SEQ ID NO: 32410 - DNA, 260 bp, Unknown
  Description of Unknown: RightRegion for integrase B6411 sequence
aaaaagatagtgttcgaccgggaaacccggcgttttacgttcttcttttacacctcataagttattgcagtttggcggtccggacggtgaattagctgcttccatgcgttatctttcccaacgctacaccatgccatgcagagaagcagcgggacttttaacggatatcggcacagaagaactggctcatctggaaatcatctgcgctatggtatttcagcttaccaaagacctgacggcagaacaggcaaagacagccg

SEQ ID NO: 32411 - DNA, 260 bp, Unknown
  Description of Unknown: RightRegion for integrase B6412 sequence
gaaaagaccgagcgcggcacggggttgaacccacgcctgcgcgtaactctcagaatctaaatgtttatcatcttgtgccagatttatagggcacgcgatgataaacagacagagaatataggcaaacataggcggatagcgtagtgctacccgccttttttgtgcttagcttacccgcttccacatgaacacaaccagatacggaggaaggttgttgtgtggcttgccgccgccagtcgcgcttgtggtggtgccttggt

SEQ ID NO: 32412 - DNA, 260 bp, Unknown; identical to SEQ ID NO: 32394
  Description of Unknown: RightRegion for integrase B6413 sequence

SEQ ID NO: 32413 - DNA, 260 bp, Unknown
  Description of Unknown: RightRegion for integrase B6414 sequence
tataaacgtgaaaaatccgctcccgagggcgatattttcttgaaaatctattataaataactttttacccaccttatgtatcttgttgccataactgtcgccatagcaatccataatattccggaaggaattgctacttctgtaccgatatactactcaacaggcagcagaaaaagagcatttatagtatcgtttttttcgggtattacggaacctttaggtgctataatcggttatttaattttacgtccgtttttcaa

SEQ ID NO: 32414 - DNA, 109 bp, Unknown
  Description of Unknown: RightRegion for integrase B6415 sequence
gaaaagatagtatttgaccgggaaacccggagttttacgttcttttattacacatcataggttattacagtacggcggccccgacggcgagatgggcgcatccatgcgc

SEQ ID NO: 32415 - DNA, 260 bp, Unknown
  Description of Unknown: RightRegion for integrase B6416 sequence
tataaacgtgaaaaatccgctcccgagggcgatattttcttgaaaatctattataaataactttttatccatcttatgtatcttgttgccatagctgttgccatagcaatacacaacatacctgaaggaattgctacgtctgtgccgatatactattccacaggcagcagaaaaagagcatttatggtatcgttcttttcgggcattacagaacctttaggtgctataatcggttatttaattttacgtccgtttttcaa

SEQ ID NO: 32416 - DNA, 260 bp, Unknown
  Description of Unknown: RightRegion for integrase B6417 sequence
acgaaagaatatacaaacgggagggcaggaaatgtcaatggaaaactgtgcaaacactaaacccaaaattacgattattccagcgaaaacaagagtcgaacggcttgaccctatgtcggtagcgatgggacaaaagcctaaaatacgagtggctgcatatgcacgcgtgtcgaccgaccacgaagaacaggagagcagttacgaggcacaggtagaccacttcaccaaactcatagcaagccatgatgattggacgatgg

SEQ ID NO: 32417 - DNA, 260 bp, Unknown
  Description of Unknown: RightRegion for integrase B6418 sequence
tataaacgtgaaaaatccgctcccgagggcgatattttcttgaaaatctattataaataactttttattcaccttatgtatcttgttgccatagctgtcgccatagcaatccataatattccggaaggaattgctacgtctgtaccgatatactactcaacaggcagcagaaaaagagcatttatagtatcgtttttttcgggtattacggaacctttaggtgctataatcggttatttaattttacgtccgtttttcaa

SEQ ID NO: 32418 - DNA, 260 bp, Unknown
  Description of Unknown: RightRegion for integrase B6419 sequence
acgaaagaatatacaaacgggagggcgggaaatgtcaatggaaaactgtgcaaacactaaacccaaaattacgattataccagcgaaaacaagagtcgaacggcttgaccctatgtcgatagcgatgggacaaaagcctaaaatacgagtggctgcatatgcacgagtgtcgaccgaccacgaagaacaggagagcagttacgaggcacaggtagaccacttcaccaaactcatagcaagccatgatgattggacgatgg

SEQ ID NO: 32419 - DNA, 260 bp, Unknown; identical to SEQ ID NO: 32377
  Description of Unknown: RightRegion for integrase B6420 sequence

SEQ ID NO: 32420 - DNA, 260 bp, Unknown
  Description of Unknown: RightRegion for integrase B6421 sequence
gcacagcagggcaagaaggggtttgctcctgagtctgttgagatcgtgtggaagcagtgaggctccgccgtggtgctgtgggtggggttcaagaagcatccgagaccgcgccctagcgggcgcgatgaggagcaactgtacagcgcccctatggggcgcgagctcatcctcactcgtgcatgatctcgtgggagaaagtgaatgatggggaggtcatgctcataacctcaccttggaaacctcacctcaggagttgtatc

SEQ ID NO: 32421 - DNA, 260 bp, Unknown
  Description of Unknown: RightRegion for integrase B6422 sequence
tataaacgtgaaaaatccgctcccgagggcgatatcttcttgaaaatctattataaataactttttacccgccttatgtatcttgttgccatagctgtatctattcccgacataccattcatttctatgtctaaaataactatatcatatatatcttcattattgtaatgactaagtaaagattcacctgatataaaaacatcatattcaatttcattatatattgattttatttttttaatatattcttcaatatgatt

SEQ ID NO: 32422 - DNA, 260 bp, Unknown
  Description of Unknown: RightRegion for integrase B6423 sequence
gaaaggatgtgctaccggaagcgagattcagatatgtcgttgcgcatcgattttttataacttaatatgtacaagtacaatataatgttttgacattgtatctaacttgtacatattaaggctttcaaaaagcgtacaatacactcattctggacttttttactattgtgcaatttgcataattcatacgtttgtgtattgtgcatatgtacaaaactaccacgcaatgcgtagtttcctattgacataccacgcaatgc

SEQ ID NO: 32423 - DNA, 140 bp, Unknown
  Description of Unknown: RightRegion for integrase B6424 sequence
cctctgaaagccgtcgaagatgcgtttggttcggatttaactcaagttgctccaccataatttggggttgtctcactaaaaagaggcaactcctttttggtgcaaaaaaagcattcggactatgaaaacccgaatgcctg

SEQ ID NO: 32424 - DNA, 260 bp, Unknown
  Description of Unknown: RightRegion for integrase B6425 sequence
agaaccgagatctgcgccgttgggaccgtcgtgctgctcaggataccacgggcggcgtagcgacaccttttctcgagaaaaaacccgcccgggaaaacccgagcgggctgcggctaatgccggttgatgctcacgatgcagagcccgattgtcgccacggtgccgccgaagagcgcgccgaggacgaaggccaacgcgatcatgctagtacgggttgccgtcggtgacgcagacctgaaggcggtccagcggctcgccgt

SEQ ID NO: 32425 - DNA, 260 bp, Unknown
  Description of Unknown: RightRegion for integrase B6426 sequence
aaaaagatagtgttcgaccgggaaacccggcgttttacgttcttcttttacacctcataagttattgcagtttggcggccccgacggcgagatgggcgcatccatgcgctatctgtcccagcgctacgccatgccttataaagaaggcaaggctgttttgaccgatatcggcacagaggaactagcacatctggaaatgatcgccgccattgtccatcagctgacccggaacctcacagccgagcagctggtagaacagg

SEQ ID NO: 32426 - DNA, 260 bp, Unknown
  Description of Unknown: RightRegion for integrase B6427 sequence
acgaaagaatatacaaacgggagggcaggaaatgtcaatggaaaactgtgcaaacactaaacccaaaattacgattatcccagccaagacgagagtcgaacggcttgaccctatgtcggtagcgatgggacaaaagcctaaaatacgagtggctgcatatgcacgagtgtcgaccgaccacgaagaacaggagagcagttacgaggcacaggtagaccacttcaccaaactcattgcaagccatgatgattggacgatgg

SEQ ID NO: 32427 - DNA, 260 bp, Unknown
  Description of Unknown: RightRegion for integrase B6428 sequence
ctgattgataaagttgtagtcctcaatacagatgtcaccatttactggtctttctgctgatcatcctttaataccagcctgcagatagtttctacatttgcggtccaggggaactggtccacagcgcaggctttctctaccacatagccgccagccaggaaaacttccaagtctcttaccagactggtcggtttgcatgaaatgtaaatgatagttttgcacctaatagtggcaatgatcttcggcagtgccttggggtg

SEQ ID NO: 32428 - DNA, 260 bp, Unknown
  Description of Unknown: RightRegion for integrase B6429 sequence
gaaaagaccgagcgcggcacgggattgaacccacgcctgcgcgtgactctcaaaatctaaatgtttatcatcttgtgcccgatttatagggcacgcgatgataaacagccttacaaaacttataaatggtataaaaacggggaacctgcaagacaaacgggttcccctttttcgcgtcattccgcccgctgctagcctattctagcccacatgtagcagaccaaatatggcggcatattattgtggggcttgcctccacc

SEQ ID NO: 32429 - DNA, 112 bp, Unknown
  Description of Unknown: RightRegion for integrase B6430 sequence
ctaaaaagcaccgttgagccaatgctcttaggtgctaattttaataatggtggaggttaggagattcgaactcctgaccccctgcgtgcaaagcaggtgctctaccagctga

SEQ ID NO: 32430 - DNA, 260 bp, Unknown
  Description of Unknown: RightRegion for integrase B6431 sequence
gaaaagaccgagcgtggcacgggattgaacccccgcctgcgcgtaactcttagaatctaaatgtttatcatcgcgtgcccgatttatagggcacgcgatgataaacagacttacaaaacttataaatggtataaaacggggaacctgcaagacagcgggttcccttttttgtgttcagcttacccgctgccacatgtagcagaccaaatacggtggcatattattgtgtggcttgcctccaccagtcgatccagtcacac

SEQ ID NO: 32431 - DNA, 109 bp, Unknown
  Description of Unknown: RightRegion for integrase B6432 sequence
gtttatgacaaggcaaaagatgaaatacatattttcttctatcttctcgaccccttgtaaatcaaggatttgagcgttgttccccctatagatgtatggtggaccagat

SEQ ID NO: 32432 - DNA, 260 bp, Unknown
  Description of Unknown: RightRegion for integrase B6433 sequence
agaaccgagatctgcgccgttgggaccgtcgtgctgctcaggataccacgggcggcgtagcgacaccttttctcgagaaaaaacccgcccgggaaaacccgagcgggctgcggctaatgccggttgatgctcacgatgcagagcccgattgtcgccacggcgccgccgaagagcgcgccgagcacgaatgccagcgcgatcatcgacgggtaccgtcagacacgtagcattggagacggtcgagggcataaccgtagatg

SEQ ID NO: 32433 - DNA, 260 bp, Unknown
  Description of Unknown: RightRegion for integrase B6434 sequence
atgtatactagaacatctaagaaagaagattttaaactggatatctcctatcatcaatagcagcctcattttttgggttgctatttttattcatctattaattttcttatttgtcctccgccttcttctatttgctttttagattttagtagtctttccatatattctggattgttatatatatcctcattgcctactggtttccctgtatcccattcctcaaatttatattcaccctcaaaacctttgattaattcttt

SEQ ID NO: 32434 - DNA, 260 bp, Unknown
  Description of Unknown: RightRegion for integrase B6435 sequence
tataaacgtgaaaaatccgctcccgagggcgatatcttcttgaaaatctattataaataactttttacccgccttatgtatcttgttgccatagctgttgccatagcaatccataatattccggaagggattgctacgtctgtaccgatatactactcaacaggcagcagaaaaagagcatttatagtatcgtttttttctggtattacggaacctttaggtgctataatcggttatttaattttacgtccgtttttcaa

SEQ ID NO: 32435 - DNA, 260 bp, Unknown
  Description of Unknown: RightRegion for integrase B6436 sequence
gaaaagatagtatttgaccgggaaacccggagttttacgttcttttactacacatcataagttattacaatacggcgggccagaatgttataacttatgaggtttcttcctattatatagtatcattttaccattgacgtctgcgaggataggtattatactttaagtacattgtcgatgcaaatgcatcgtggatttaagctttattatattttttgttatgttgagtttcgactcatatgcggattttttccaaaaaa

SEQ ID NO: 32436 - DNA, 260 bp, Unknown
  Description of Unknown: RightRegion for integrase B6437 sequence
gaaaagaccgagcgcggcacgggattgaacccacgcctgcgcgtaactctcagaatctaaatgtttatcatcttgtgcccgatttatagggcacgcgatgataaacagacagagaatagaggcaaacataggcggatagcatagtgctacacgccttttttcgcgtgctttagcttactctcttccacatgtacaccacgaggtatggaggcatattgctgtgaggcttgccgccacccgtagcgccagtcacactaccc

SEQ ID NO: 32437 - DNA, 109 bp, Unknown
  Description of Unknown: RightRegion for integrase B6438 sequence
tataaacgtgaaaaatccgctcccgagggcgatattttcttgaaaatctattataaataacttttacccgccttatgtatcttgttgccatagatgtcgccatagcaat

SEQ ID NO: 32438 - DNA, 260 bp, Unknown
  Description of Unknown: RightRegion for integrase B6439 sequence
gaaaagaccgagcgcggcacgggattgaacccacgcctgcgcgtaactctcagaatctaaatgtttatcatcttgtgccagatttatagggcacgcgatgataaacagacagagaatatagacaaatataggcggatagtcgtatggctacccgccttttcgttatgcagttcgctgccacatgtacaccacgaggtacggcggcatattgctgtgaggcttgccgccgccagtcgcccccgtcacgccgccttggtcaa

SEQ ID NO: 32439 - DNA, 260 bp, Unknown
  Description of Unknown: RightRegion for integrase B6440 sequence
ctaactgataaagttgtggttctcaatgcaaatgtcacgatttactggtctttctgctgatcctcctttaataccagcctgcagatagtttctacgttcgcagtccagggaaactggtccactgcgcaggctttctctaccacatacccgccggccagaaaaacttccaagtctcttaccaagctggtcggtttgcacgaaatgtaaatgattgttttacacctaatagtggcaatgatcttcggcagtgctttggggtg

SEQ ID NO: 32440 - DNA, 260 bp, Unknown
  Description of Unknown: RightRegion for integrase B6441 sequence
aagattgtttatgataaaaacaccgataccttaaaggtctactacttctacaacccttgattttactggctttttcggtgtttgtacgttgttgcaatctggttgtcacagtggggttcaaagtctctggcagatcagggatacacagccacagaaatcctccgctactactatggtgacaacatctacatcaattcagcggaggagatttccgggattccttcttcctggcctggatacgatctcgacatcggggcaac

SEQ ID NO: 32441 - DNA, 260 bp, Unknown
  Description of Unknown: RightRegion for integrase B6442 sequence
aagcgtatcgaggtattacctgaacctgattctataaaaatctactggaaattcgtttaatatttttaccctaattgtatgtatggattcatggtggcgatcagttgaaagtctgccggaaacttgtggtagatcccatttctggtgatatcgatcgttccatcttccaatggctgtctgagtgcttcgatacattctgttttaaattccataaattcgtccagaaataaaatgccatgatgtgctaatgtgatctctcc

SEQ ID NO: 32442 - DNA, 260 bp, Unknown
  Description of Unknown: RightRegion for integrase B6443 sequence
aaacaacagttttctgcatttctgtctgatgatataatgagcacacagtgctcatcttaggagtttctccgaaactccattatgcgcagaaatcatgcgcaactattatgatataatatctatataacaaatgccgtattttaggcattttggggtaattgctactatccgagtatggtggtcctgacggcgaaattggtgcttccatgcgatatctgtcacagcgttattccatggaaaaccgcattgcggccggaacg

SEQ ID NO: 32443 - DNA, 260 bp, Unknown
  Description of Unknown: RightRegion for integrase B6444 sequence
aaacaacagttttctgcatttctgtctgatgatataatgagcacacagtgctcatcttaggagtttctccgaaactccattatgcgcagaaatcatgcacaactattatgatataatatctatataacaaatgccgtattttaggcattttggggcaattgctactatccgagtatggtggtcctgacggcgaaattggtgcttccatgcgatatctgtcacagcgttattccatggaaaaccgcattgcggccggaacg

SEQ ID NO: 32444 - DNA, 109 bp, Unknown
  Description of Unknown: RightRegion for integrase B6445 sequence
acacttatagataaggtctatgtttataaggaccgtatacatattaaatgggcgtactgatacgcccattttttgtatattttgtttctaatagttccacatcccactg

SEQ ID NO: 32445 - DNA, 260 bp, Unknown
  Description of Unknown: RightRegion for integrase B6446 sequence
aacaataccgctactatttcggatttggacttatcaagtccaccatgtgaattagggtaagagtattgcacagtttttcttagactgtctaatactcttattttttttatttcttttttccaagtagactcggggtgaatcatcggataaatgctaaccgttaaaaggggctgctggacaaaaacggaaaaaactttacctaaaaagggagaataaatcacttttgaactctctagtccaatcgttatttggacttttgc

SEQ ID NO: 32446 - DNA, 109 bp, Unknown
  Description of Unknown: RightRegion for integrase B6447 sequence
gacggcagttttaccgtaaatatcggcgtacatactagtggttgcggaggcaggatttgaacctacgaccttcgggttatgagcccgacgagctaccaactgctccact

SEQ ID NO: 32447 - DNA, 260 bp, Unknown
  Description of Unknown: RightRegion for integrase B6448 sequence
aaaattgtctatgaaaaggacaaggacttattaaaggtttattactactacatgccgtaaacccttgaaaacactgggtttgcgggtgtttgtaggttgttacaaaaaggtcatccaatcgggacagctcaccctggtaccatcacaatactgcgtcagaatcggctgccgtacattcggacgggacagatagtttgcaaaaatctcatccactaccgccgaaatcgtatcgtacacatttcgttccggaatccacttgt

SEQ ID NO: 32448 - DNA, 260 bp, Unknown
  Description of Unknown: RightRegion for integrase B6449 sequence
gacggaacagtgaccgtaaacttgggcgtacatattaatggttgcggggactggacttgaaccagcgaccttcgggttatgagtagtatattatattttactcacgctttcacactatatcatcaaaccgcataacaaagccattttcgcaactattacttttcatactttaccgtactttgtccgctatttttatatgtgtagcggacaaatagcggacagaatttttataaatcatttttttattgacaaccttattg

SEQ ID NO: 32449 - DNA, 260 bp, Unknown
  Description of Unknown: RightRegion for integrase B6450 sequence
aaaatcatctacgaaaaggataaggacttgttaaaggtttattactactacatgccgtaaacccttgaaaacactgggtttgcgggtgtttgtaggttgttacaaaaaggtcaacctttatgcaagggcatacaagtaatattcttacctattataataggataaaaatggtacaatattcacccctcagagagctaatctccgaggggggttttattaaatagatttaaccggttcacgatacaatgggttcatcagtc

SEQ ID NO: 32450 - DNA, 260 bp, Unknown
  Description of Unknown: RightRegion for integrase B6451 sequence
aagcgtattgagatattacctgaacccgactctataaaaatctattggaaattcgtttaacatttttaccctaattgcgggcatggattcatggtggcgatcagttgaaagtctgccggaaacttgtggtagatcccatttctggtgatatcgatcgttccatcttccagtggctgtctgagtgcttcgatacattctgttttaaattccataaattcgtccagaaataaaatgccatgatgtgctaatgtgatttctcc

SEQ ID NO: 32451 - DNA, 260 bp, Unknown
  Description of Unknown: RightRegion for integrase B6452 sequence
cggattgatcttgatggtgaaaacatagacattcattggagcttcgctcctgaatcgtgaggcgggtggcatacatggaaaagttacattttgaggtgtcgtcgccggaaagttttatcaagctggcctgcacgatgctttttgaaaaaagcgttgaatttagcgaatggggttccgtctggaacgagatgtttgctggcgtagagggcgaagagctgtttttgggatttgctgaagaacttttcccagctggctgcatc

SEQ ID NO: 32452 - DNA, 260 bp, Unknown
  Description of Unknown: RightRegion for integrase B6453 sequence
aaacaacaattttctgcatttctgtctgatgatataatgagcacacagtgctcatcttaggagtttctccgaaactccattatgcgcagaaatcatgcgcaactattatgatataatatctatataacaaatgccgtattttaggcattttggggcaattgctactatccgagtacggtggtcctgacggcgaaattggtgcttccatgcgatatctgtcacagcgttattccatggaaaaccgcattgcggccggaacg

SEQ ID NO: 32453 - DNA, 109 bp, Unknown; identical to SEQ ID NO: 32444
  Description of Unknown: RightRegion for integrase B6454 sequence

SEQ ID NO: 32454 - DNA, 260 bp, Unknown
  Description of Unknown: RightRegion for integrase B6455 sequence
gatcacatcgagtaccatcgagacagcgataccttcgacatcttctattcttattcctaaacagctttgtaagtgccgacttttcggcactttactcatctatcccttaacgtgacacggacctccgaactgtgaaatgatcacttttgccatctcagcatttgggcgagtgatatttaccgggtattgcaaacgtttttcatatttccacattgatcagcatcctccttcccatggccacggaccttctacccaggtcc

SEQ ID NO: 32455 - DNA, 260 bp, Unknown
  Description of Unknown: RightRegion for integrase B6456 sequence
aaacaacagttttctgcatttctgtctgatgatataatgaacacacagtgctcatcttaggagtttctccgaaactccattatgatataatatctatataacaaatgccgtattttaggcattttagggcaattgctactatccgagtacggtggtcctgacggcgaaattggtgcttccatgcgatatctgtcacagcgttattccatggaaaaccgcattgcggcaggaacgttgactgacatcggcaccgaagaatt

SEQ ID NO: 32456 - DNA, 260 bp, Unknown
  Description of Unknown: RightRegion for integrase B6457 sequence
ctggaatacagcaacggcgctccgggcaacaagcccggctggaacgtaaaggaggcataaccatggcaccggcattacgaagagtagtacgcaccatgccgcagatcgcggtcgtgcagatcgacgacaccccgcaggtaaagaaaacaaaggtcgcggcctacgcccgcgtatccactgagaaggaagaacaggaagatagctttgagagacaggtagagcactacacccacctgatcgagtcgaaccccgaatggacg

SEQ ID NO: 32457 - DNA, 109 bp, Unknown
  Description of Unknown: RightRegion for integrase B6458 sequence
aaaattgtctatgatcgagaagaagacgaacttaaagtatactactaccacatgccgtaaacccttgattttgctgggtttgttggacttttgtcggttgttgcaaaaa

SEQ ID NO: 32458 - DNA, 260 bp, Unknown
  Description of Unknown: RightRegion for integrase B6459 sequence
acacttatagataaggtctatgtttataaggaccgtatacatattaaatgggcgtactgatacgcccatttttttgtatattttgtttctaatagttccacatcccactgtatagcatagtaaccacacgcctttgcagcatccaatacagtatcattgtactctccaaaaggtggtctatacaggtttgcatctatacctaacaagtttttaatcttatcgtgacacccctgtatattctccttattttcctctaggga

SEQ ID NO: 32459 - DNA, 260 bp, Unknown
  Description of Unknown: RightRegion for integrase B6460 sequence
gatcacatcgagtaccatcgagacagcgataccttcgacatcttctattcttattcctaaacagctttgtaagtgccgacttttcggcactttactcatctatcccttaacgtgacacggacctccgaattgtgaaatgatcacttttgccatctcagcatttgggcgagtgatatttaccgggtattgcaaccgtttttcatatttccacattgatcaacatcctccttcccatggccacgggccttctacccaggtcc

SEQ ID NO: 32460 - DNA, 260 bp, Unknown
  Description of Unknown: RightRegion for integrase B6461 sequence
aaacaacagttttctgcatttctgtctgatgatataatgagcacacagtgctcatcttaggagtttctccgaaactccattatgatatttatataacaaatgccgtattttaggcattttggggcaattgctactatccgagtacggtggtcctgacggcgaaattggtgcttccatgcgatatctgtcacagcgttattccatggaaaaccgcattgcggccggaacgttgactgacatcggcaccgaggaattggccc

SEQ ID NO: 32461 - DNA, 260 bp, Unknown
  Description of Unknown: RightRegion for integrase B6462 sequence
aaagcgatatattttagtagattaaatgataaaatagtcttgaaagtcgtccttagatagacgggataacatgattattctaattcataagtaaatccttctccatcgacttcatgaacactatttacaataataaaagctcttggatctaactgcatgatttcgtgttctaaattcgaatacattttttgtggaattacaatcatcaatacaggtttggattcatttgtatatccacccttaccttctaaaattgtaac

SEQ ID NO: 32462 - DNA, 260 bp, Unknown
  Description of Unknown: RightRegion for integrase B6463 sequence
tggctcggtgttcgcgtttatagcgggcatctattttgtcgatgtttcccatcaggctgagcctggacgcacttcgcgttccgggctcagctttttgttttgccttttcactcacatttgcagcaggcatctatcttgtcagcatttcccagatgggtattatatgaacgcctactttttcaaaggcggctttgccgtaagggtgtggctgtgatgtcaacagtagagaatgggcaacaagattagtagtcttgttcccc

SEQ ID NO: 32463 - DNA, 260 bp, Unknown
  Description of Unknown: RightRegion for integrase B6464 sequence
gagcgtatcgaagtattacctgaacctgattctataaaaatctactggaaattcgtttaatattttaccctaattgtatgtatggattcatggtggcgatcagttgaaagtctgccggaaacttgtggtagatcccatttctggtgatatcgatcgttccatcttccaatggctgtctgagtgcttcgatacattctgttttaaattccataaattcgtccagaaataaaatgccatgatgtgctaatgtgatctctcct

SEQ ID NO: 32464 - DNA, 165 bp, Unknown
  Description of Unknown: RightRegion for integrase B6465 sequence
aaaattgtctatgatcgagaagaagacgaacttaaagtatactactaccacatgccgtaaacccttgattttgctgggtttgttggacttttgtcggttgttgcaaaaaggtcatccagtcgggacagctcaccctggtaccatcacaatactgcgtcagaatcg

SEQ ID NO: 32465 - DNA, 109 bp, Unknown
  Description of Unknown: RightRegion for integrase B6466 sequence
aaaataatctacgaaaaggacaaggacttgctaaaggtttattactactacatgccgtaaatccttgaaaacactgggtttgcgggtgtttgtaggttgttacaaaaag

SEQ ID NO: 32466 - DNA, 260 bp, Unknown
  Description of Unknown: RightRegion for integrase B6467 sequence
cggattgatcttgatggtgaaaacatagacattcattggagctttgctcctgaatcgtgaggcgggtggcatacatggaaaagttacattttgaggtgtcgtcgccggaaagttttatcaagctggcctgcacgatgctttttgaaaaaagcgttgaatttagcgaatggggttccgtctggaacgagatgtttgctggcgtagagggcgaagagctgtttttgggatttgctgaagaacttttcccagctggctgcatc

SEQ ID NO: 32467 - DNA, 109 bp, Unknown
  Description of Unknown: RightRegion for integrase B6468 sequence
aaaatcatctacgaaaaggataaggacttgttaaaggtttattactactacatgccgtaaacccttgaaaacactgggtttgctggtgtttgtaggttgttacaaaaag

SEQ ID NO: 32468 - DNA, 260 bp, Unknown
  Description of Unknown: RightRegion for integrase B6469 sequence
aaacaacagttttctgcatttctgtctgatgatataatgagcacacagtgctcatcttaggagtttctccgaaactccattatgatatctatataacaaatgccgtattttaggcattttggggcaattgctactatccgagtacggtggtcctgacggcgaaattggtgcttccatgcgatatctgtcacagcgttattccatggaaaaccgcattgcggccggaacgttgactgacatcggcaccgaggaattggccc

SEQ ID NO: 32469 - DNA, 260 bp, Unknown
  Description of Unknown: RightRegion for integrase B6470 sequence
acacttatagaaaaggtctatgtttataaggaccgtatacatattaaatgggcgtactaatacgcccatttttttgtgtatcttgtttctaatagttctacatcccactgtatagcatagtatccacacgcctttgctgcatctagtacagtatcattgtactctccaaaaggtggtctatacaggttggcatctatacctaacaagtttttaatcttctcgtgacacccctgtatattctccttattctcctctaggga

SEQ ID NO: 32470 - DNA, 260 bp, Unknown
  Description of Unknown: RightRegion for integrase B6471 sequence
cggattgatcttgaaggtgaaaacatagacattcattggagttttgctcctgaatcgtgaggcgggtggcatacatggaaaagttacattttgaggtgtcgtcgccggaaagttttatcaagctggcctgcacgatactttttgaaaaaagcgttgaatttagcgaatggggttccgtctggaacgagatgtttgctggcgtagagggcgaagagctgtttttgggatttactgaagaacttttcccagctggctgcatc

SEQ ID NO: 32471 - DNA, 183 bp, Unknown
  Description of Unknown: RightRegion for integrase B6472 sequence
aaacaacagtttactgcatttctgtctgatgatataatgagcacacagtgctcatcttaggagtttctccgaaactccattatgcgcagaaatcatgcgcaactattatgatataatatctatataacaaatgccgtattttaggcattttggggcaattgctactatccgagtatggtggtc

SEQ ID NO: 32472 - DNA, 260 bp, Unknown
  Description of Unknown: RightRegion for integrase B6473 sequence
aaacaacaatttactgcatttctgtctgatgatataatgagcacacagtgctcatcttaggcattttggggcaattgctactatccgagtatggtggtcctgacggcgaaattggtgcttccatgcgatatctgtcacagcgttattccatggaaaaccgcattgcggccggaacgttgactgacatcggcaccgaggaattggcccacttagagatggttgcaaccatcatctgccaattaaccaggaatcttaccccg

SEQ ID NO: 32473 - DNA, 109 bp, Unknown
  Description of Unknown: RightRegion for integrase B6474 sequence
gaactcccaggtagttggcagttcggagggattacgtttggtgggcgttacaagatttgaacttgtgacctcttccgtgtcagggaagcgctctccccctgagctaaac

SEQ ID NO: 32474 - DNA, 260 bp, Unknown
  Description of Unknown: RightRegion for integrase B6475 sequence
gatcacatggagtaccatcgagacagcgataccttcgacatcttctattcttattcctaaacctctttgtaagtgccgacttttcggcactttacttatctatcccttaacgtgacacggacctccgaactgtgaaatgatcacttttgccatctcagcatttgggcgagtgatatttaccgggtattgcaaacgtttttcatatttccacattgatcagcatcctccttcccatggccacggaccttctacccaggtcc

SEQ ID NO: 32475 - DNA, 260 bp, Unknown
  Description of Unknown: RightRegion for integrase B6476 sequence
cggattgatcttgatggcgaaaacatagacattcattggagctttgctcctgaatcgtgaggcgggtggcatacatggaaaagttacattttgaggtgtcgtcgccggaaagttttatcaagctggcctgcacgatgctttttgaaaaaagcgttgaatttagcgaatggggttccgtctggaacgagatgtttgctggcatagagggcgaagagctgtttttgggatttactgaagaacttttcccagctggctgcatc

SEQ ID NO: 32476 - DNA, 260 bp, Unknown
  Description of Unknown: RightRegion for integrase B6477 sequence
aaacaacaatttactgcatttctgtctgatgatataataagcacacagtgctcatcttaggagtttctccgaaactccattatgcgcagaaatcatgcgcaactattatgatataatatctatataacaaatgccgtattttaggcattttggggcaattgctactatccgagtatggtggtcctgacggcgaaattggtgcttccatgcgatatctgtcacagcgttattccatggaaaaccgcattgcggcaggaacg

SEQ ID NO: 32477 - DNA, 260 bp, Unknown
  Description of Unknown: RightRegion for integrase B6478 sequence
aaagagaagaaaaccaaaccccgcgacttcaccttggagctccagctccgcgatttttaaccaccatatttataaaacggtcagtcttatgacaaagactgcatcgaagacctccgggtttaccccaccgtcgggtcccagacctacatagacaacgccttcagcgtccggcccaagagcgccgagctgctgtacgccgaggtgaacgtcgaggccatcaccttcaacaagggctactacaccgttgacgtcacctattt

SEQ ID NO: 32478 - DNA, 260 bp, Unknown
  Description of Unknown: RightRegion for integrase B6479 sequence
aaacaacagttttctgcatttctgtctgatgatataatgagcacacagtgctcatcttaggagtttctccgaaactccattatgggcagaaatcatgcgcaactattatgatataatatctatataacaaatgccgtattttaggcattttggggcaattgctactatccgagcacggtggtcctgacggcgaaattggtgcttccatgcgatatctgtcacagcgttattccatggaaaaccgcattgcggccggaacg

SEQ ID NO: 32479 - DNA, 109 bp, Unknown
  Description of Unknown: RightRegion for integrase B6480 sequence
aaagtgatatattttagtagaatcaacgatgaaatagtcttgaaagttgtccttagatagacgggataacatgattattccaattcataagtaaatccttctccatcga

SEQ ID NO: 32480 - DNA, 260 bp, Unknown
  Description of Unknown: RightRegion for integrase B6481 sequence
aaagagaagaaaaccaaaccccgcgacttcaccctggagctccagctccgcgatttttaactgccatatttataaaacggtcagtcttatgacaaagactgcatcgaggacctgcgggtctatcccaccgtcggctcacagacctacatagacaacgccttcagcgtgaggcccaaaagcgccgagctgctgtatgcggaggtgaacgtcgaggccatcaccttcaacaaaggctattacaccgtggatgtgacctactt

SEQ ID NO: 32481 - DNA, 260 bp, Unknown
  Description of Unknown: RightRegion for integrase B6482 sequence
aaaattgtctatgatcgagaagaagacgaacttaaagtatactactaccacatgccgtaaacccttgattttgctgggtttgttggacttttgtcggttgttgcaaaaaggtcaaccttttctcaagagcgtacaattatttttctacctattataaagaagtaaaaatggtacaatattcacccctcagagaacgatctccgaggggattttattagaacaactggaatctatcgattgcctgtccgaacgctccagca

SEQ ID NO: 32482 - DNA, 109 bp, Unknown
  Description of Unknown: RightRegion for integrase B6483 sequence
aaaattgtctatgaaaaggacaaagacttattaaaggtttattactactacatgccgtaaacccttgtaaatactgggtttacgggtgtttgtaggttgttacaaaaag

SEQ ID NO: 32483 - DNA, 260 bp, Unknown
  Description of Unknown: RightRegion for integrase B6484 sequence
aaaatcatctacgaaaaggataaggacttgttaaaggtttattactactacatgccgtaaacccttgaaaacactgggtttgctggtgcttgtaggttgttacaaaaaggtcatccagtttggacaacttaccctgtttccatcgcagtactgcgtcaaaatcggctgtcttacattcgggcgggacaaatagtttgcaaaaatctcatccactaccgaagaaatcgtatcatagacattccgctccggaatccatttat

SEQ ID NO: 32484 - DNA, 260 bp, Unknown
  Description of Unknown: RightRegion for integrase B6485 sequence
aaagtgatatattttagtagaatcaatgatgaaatagtcttgaaagttgtccttagatagacgggataacatgattattccagttcataagtaaatccttctccatcgacttcatgaacactatttacaataataaaagctcttggatctaactgcatgatttcgtgttctaaattcgaatacattttttgtggaattacaatcatcaatacaggtttggattcatttgtatatccacccttaccttctaaaattgtaac

SEQ ID NO: 32485 - DNA, 260 bp, Unknown
  Description of Unknown: RightRegion for integrase B6486 sequence
acacttatagagaaggtctatatttataaggaccgtatacatattaaatgggcgtattagtacgcccattttgtatattttgtttctaatagttccacatcccactgtatagcatagtatccacatgcctttgctgcatctagtacagtatcattatactccccaaaaggtggtctgtacaggttggcatctatacctaacaagtttttaattttctcgtgacacccctgtatattctccttattctcctccagtgataa

SEQ ID NO: 32486 - DNA, 260 bp, Unknown
  Description of Unknown: RightRegion for integrase B6487 sequence
aaacaacagttttctgcatttctgtctgatgatataatgagcacacagtgctcatcttaggagtttctccgaaactccattatgcgcagaaatcatgtgcaactattatgatataatatctatataacaaatgccgcattttaggcattttggggcaattgctactatccgagtatggtggtcctgacggcgaaattggtgcttccatgcgatatctgtcacagcgttattccatggaaaaccgcattgcggccggaacg

SEQ ID NO: 32487 - DNA, 260 bp, Unknown
  Description of Unknown: RightRegion for integrase B6488 sequence
gataaaatagtaatgctgaatgatgagataactattcactggtcattctgtcagaactaattctacaactgtttcaacgtgagaagtcgcaggaaacatgtctacgcaacaaactctttttactttgtatcctctctcttgcaggataatgaggtcacgtgcaagtgaagttggcttgcaggagacatagattaactttgttgccctaatagaatcactgattttatccaatgccttaggatgaataccatctcttggcg

SEQ ID NO: 32488 - DNA, 260 bp, Unknown
  Description of Unknown: RightRegion for integrase B6489 sequence
aaaatcatctacgaaaaggataaggacttgttaaaggtttattactactacatgccgtaaacccttgaaaacactgggtttgtgggtgtttgtaggttgttacaaaaaggtcaaccttttttcaacagcgtacaaataatatccctacctattataatacaatgaaaatggtacaatattcatgccggcaactgcggtctaccggcacttaaataaccagcccgtaaaaaggtgtgcatcatttcggttgtcagagtcat

SEQ ID NO: 32489 - DNA, 260 bp, Unknown; identical to SEQ ID NO: 32455
  Description of Unknown: RightRegion for integrase B6490 sequence

SEQ ID NO: 32490 - DNA, 260 bp, Unknown
  Description of Unknown: RightRegion for integrase B6491 sequence
aaagtgatatattttagtaaaatcaatgatgaaatagtcttgaaagtcgtccttagatagacgggataacatgattattccaattcataagtaaatccttctccatcgacttcatgaacactatttacaataataaaagctcttggatctaactgcatgatttcgtgttctaaattcgaatacattttttgtggaattacaatcatcaatacaggtttggattcatttgtatatccacccttaccttctaaaattgtaac

SEQ ID NO: 32491 - DNA, 260 bp, Unknown
  Description of Unknown: RightRegion for integrase B6492 sequence
aaagtgatatattttagtagaatcaacgatgaaatagtcttgaaagtcgtccttagatagacgggataacatgattattccaattcaaatgtatatcattgtatttccgctacttaagtatatcagaacaaaggaaaaaagcctacagaaaatagtattccgtaggccttttttagtacattttgtatgtttttaaactgtatatgataccttttataagaatcttccataaggtgaagtgttgatacctttggcattta

SEQ ID NO: 32492 - DNA, 260 bp, Unknown
  Description of Unknown: RightRegion for integrase B6493 sequence
acacttatagataaggtctatgtttataaggaccgtatacatattaaatgggcgtactgatacgcccattttttgtgtgtattttgtttctaatagttccacatcccactgtatagcatagtatccacacgcctttgctgcatctagtacagtatcattgtactctccaaaaggtggtctatacaggttggcatctatacctaacaagtttttaatcttctcgtgacacccctgtatattctccttattctcctccagtg

SEQ ID NO: 32493 - DNA, 260 bp, Unknown
  Description of Unknown: RightRegion for integrase B6494 sequence
aaaatgcttatcgacaaagtaattctaacagatgataaaatagaaatatcctataaatagcccttttacgggctatttattatttttctctattaattcatgttcagaaaatttaagtttccctgctttataatctgccatcttttgttccaaatacctaatattgttctccgaataaaaccggtctattgcaacatcaaaaggtatgcgtttttccctgcctactttttttgcaaaaatcgtaaaagccgccgtcatag

SEQ ID NO: 32494 - DNA, 260 bp, Unknown
  Description of Unknown: RightRegion for integrase B6495 sequence
gaccatatggagtaccaccgcgacagcgatacttttaacatcttctattcttattcctaaatctctttgaaagtgccgattattcggtacttttcattttcatcccttaacgtgacacggacctccgaattgtgaaataatcacttttgccatctcagcatttgggcgagtgatatttaccgggtattgcaaccgtttttcatatttccacattgatcaacatcctccttcccatggccacgggccttctacccaggtcc

SEQ ID NO: 32495 - DNA, 260 bp, Unknown; identical to SEQ ID NO: 32492
  Description of Unknown: RightRegion for integrase B6496 sequence

SEQ ID NO: 32496 - DNA, 137 bp, Unknown
  Description of Unknown: RightRegion for integrase B6497 sequence
gagcgtatcgaagtattacctgaacctgattctataaaaatctactggaaattcgtttaatatttttaccctaattgtatgtatggattcatagtggcgatcagttgaaagtctgccggaaacttgtggtagatccc

SEQ ID NO: 32497 - DNA, 260 bp, Unknown
  Description of Unknown: RightRegion for integrase B6498 sequence
tcttctattaacaagataatgatcactaaagatggaatccaagaaattgaatttaattaaaaatagagttaagaccgaaatcttaactcttttatattgggctttttgtagtagcgtccaccaatattactaatataaacaatactagaataaatgcgaatccgccaccattttggttaactccgccattatttccttggcaacaagtatttgacaaaatatcacctcgatatattttatgcaaggtttactattttggt

SEQ ID NO: 32498 - DNA, 260 bp, Unknown
  Description of Unknown: RightRegion for integrase B6499 sequence
aaaaagattgtatttgaccgaaaaactagcgtgtttacattcttttattatgtatcatgagtttttacagtcaagtcctccatactgactcatgataaacatggccatcttcgcatttggttctttaatatttacaggaaattccagtctcttttcatagatccacattaataaccgcctccttcccatggccacgggtcgtctgtccaggaccagtagactgtatctctggcattttcagcacgaaggggaccatactg

SEQ ID NO: 32499 - DNA, 109 bp, Unknown
  Description of Unknown: RightRegion for integrase B6500 sequence
cattttgtttatgataaggaaaaggataaactggaagtgtacttcttcatgcagaaataatggattattgaatattctaatatgttacatataaacagtgaaagccgca

SEQ ID NO: 32500 - DNA, 260 bp, Unknown
  Description of Unknown: RightRegion for integrase B6501 sequence
cattttgtttatgataaagaaaaggataaacttgaagtgtacttcttcctgcaggaataataaaagagtgaggataactattcctcactcttttgttcaccttttctcagcatattcaaagtagcaattgcctctttgataaactgataaaagtacataaatgccacaattcctaataaaataatactaaatatcaatgtacttatattagtatttattggaactacttgttttatagttactaatagctctgttatctg

SEQ ID NO: 32501 - DNA, 260 bp, Unknown
  Description of Unknown: RightRegion for integrase B6502 sequence
aaaaagatcgtttttgaccgtaaaaccggtacttttaccttcttctactacacattatgaggttttgcaatacagcccaccatactgtaaaaactcatgatacttctataaggcagtctgaaaaggctgcctttaataattcctggaagtaatgcttgcaaaatcttcttcaactacccttttcaatagtaatattggcaattttaatgatcgaatttacttcaaagaaacgggtagcggtaacactttcagcataaaaa

SEQ ID NO: 32502 - DNA, 260 bp, Unknown
  Description of Unknown: RightRegion for integrase B6503 sequence
cattttgtctatgataaggaaaaggataaactggaagtgtacttcttcctacaaaaataggggaggcaatcagcactcccctattttttcaattatattttatgttatttatactacaactaatactactatcattaacaagtgatatataattttgaacaactcttttattaacaagaagatttgcattacacctgttaagtatttctattatcttttctttttctttgctgttaattggatatgactttaatggttct

SEQ ID NO: 32503 - DNA, 260 bp, Unknown
  Description of Unknown: RightRegion for integrase B6504 sequence
tattccaagattgacaacaatattaaaataacaatatatagcaaactccctataaagtaattttgcaactgtagtgtacctaggaattggctcatatcgaaattgtaggtgctatgtgtttacagcttagtgaaaatgccgaccctgaggaaattaaggctgctggttttgattcttattttgtagaccatggaactggtgtatatccttgtagtgcttctggcgtgcctttcaacgcagcttgccttgcatcaaaagga

SEQ ID NO: 32504 - DNA, 260 bp, Unknown; identical to SEQ ID NO: 32500
  Description of Unknown: RightRegion for integrase B6505 sequence

SEQ ID NO: 32505 - DNA, 260 bp, Unknown
  Description of Unknown: RightRegion for integrase B6506 sequence
aaaaagattgtatttgaccgaaaaactagcgtgtttacattcttttattatgtatcatgagtttttacagtcaagtccaccatactgtaaaaactcatgataatatcattcaactattactgcaataaaaaatacggaaacaatgcaagcattgtctccgcggaaaacatatgtttttgttctgttgaaaatttttcaccgtccaactggtttataattctttctaagcaattgaattataacacagtgtatgtactctc

SEQ ID NO: 32506 - DNA, 260 bp, Unknown
  Description of Unknown: RightRegion for integrase B6507 sequence
aaaaagattgtatttgaccgaaaaactagcgtgtttacattcttttattatgtatcatgagtttttacagtcaagcccaccatactgtaaaaactcataataatatcattcaactattgctgcaataaaaaatacggaaacaatgcaggcattgtctccgcggaaaacatatgtttttgttctgctgtaagtgtttccactgtccaactggttataattccttctagacaatcgaattatagcacagtggatgcactctc

SEQ ID NO: 32507 - DNA, 260 bp, Unknown
  Description of Unknown: RightRegion for integrase B6508 sequence
catatggtatatgacagggaaaatgataagctggaaatatacttcttcctgcaaaaataaaaaagagtcttctatataccatagaagactcttttatcaattcgttcttttttatttatctttgcttttttccttatcagttgtctgttccttatctgaaggatagtcaaagatgctttctaaatcaaatcccatatcctacctcctttgaaaccttttctcttgttcatttgctagtatagactaatccgttttaaatg

SEQ ID NO: 32508 - DNA, 260 bp, Unknown
  Description of Unknown: RightRegion for integrase B6509 sequence
ttaatcaataaaattgttatctacccggatttaatcgaaatccgctgggctttccactagattagtacattccgccggcctgtggctgtgcttgtaaaccttgagctggctccttgatgtcagctcaaggtttaccaatctatcgcatccgaacttcgatacatattatataggaaagaacgaaaaatgcaaacactaatcagtacgttttaaaacatccaaaattgaaatctgaaatgctgatcctctaaacgcatagg

SEQ ID NO: 32509 - DNA, 260 bp, Unknown
  Description of Unknown: RightRegion for integrase B6510 sequence
cattttgtttatgataaggaaaaggataaactggaagtgtacttcttcatgcagaaataatggattattgaatattctaatatgttacatataaacagtgaaagccgcaaacacagtgtttatgcgactttcactattgtataccttattgaagtatggtggaccagacggagaattaggggcgtctatgcgctatatttcacaacgatattctatgccttacagagaagtatcaggactacttacagatataggtacag

SEQ ID NO: 32510 - DNA, 260 bp, Unknown; identical to SEQ ID NO: 32503
  Description of Unknown: RightRegion for integrase B6511 sequence

SEQ ID NO: 32511 - DNA, 260 bp, Unknown; identical to SEQ ID NO: 32500
  Description of Unknown: RightRegion for integrase B6512 sequence

SEQ ID NO: 32512 - DNA, 260 bp, Unknown
  Description of Unknown: RightRegion for integrase B6513 sequence
tcgaataaaaccaagacctttcggtgttcggatttgagcggtcaagctccaccaatttgattgcaggtcgaaccctggagcagttcggcgaaaaaatcacccgctccgccaaaatcctgcacattcgtgtgggattttcctttattatttaccgcgccccggcagctgcaccgcaggggcgagatacacacgacgtaaggaggtaaccctatgaaagaggtcaaatcaccaaaaaagcccttgatctactactacggcat

SEQ ID NO: 32513 - DNA, 195 bp, Unknown
  Description of Unknown: RightRegion for integrase B6514 sequence
catatggtatatgacagggaaaatgataagctggagatatacttcttcctgcatatgtaattttacatattagcagcttttaacaaaagcactgcaaagccacttaaatactggctttgtgacatagtataccttattgaagtatggtggacccgatggcgagcttggcgcatctatgcgatatatttcccagag

SEQ ID NO: 32514 - DNA, 260 bp, Unknown
  Description of Unknown: RightRegion for integrase B6515 sequence
cattgtgtgtatgataaagaaaatgataagctggaagtgtatttcttcttgcaaaaatagaagggaactttcccttctatttttaatcagtatatattgtatcattattttcttctattgtttgaacttgatctacatctattctatcgtctttgttataacaataaaatgctgccaatgcaattattattaaagcgatagaaaaagcaataataaccctatatttcctatctaattgtccatgaatacttcttataaaa

SEQ ID NO: 32515 - DNA, 260 bp, Unknown; identical to SEQ ID NO: 31982
  Description of Unknown: RightRegion for integrase B6516 sequence

SEQ ID NO: 32516 - DNA, 260 bp, Unknown
  Description of Unknown: RightRegion for integrase B6517 sequence
aaaaagattgtatttgaccgaaaaactagcgtgtttacattcttttattatgtatcatgagtttttacagtcaagccctccatactgactcataataaacatggccatcttcgcatttggttctttaatatttacaggaaattccagtctcttttcatagatccacattaataaccgcctccttcccatggccacgggtcgtctgtccaggaccagtagactgtatctctggcattttcagcacgaaggggaccatactg

SEQ ID NO: 32517 - DNA, 260 bp, Unknown
  Description of Unknown: RightRegion for integrase B6518 sequence
tcttctattaacaagataatgatcactaaagatggaatccaagaaattgaatttaattaaaaaatagagttaagaccgaaatcttaactcttttatattgggctttttgtagtagcgtccaccgaaaataccaatggataaaaaatattgattactaacagtacaatagaaataagtccaattgttcggtaaatatttctgcgtatattagaaaatgtgatattcatatgtaccattatgaatttagcccacaaatatcc

SEQ ID NO: 32518 - DNA, 260 bp, Unknown
  Description of Unknown: RightRegion for integrase B6519 sequence
aaaaagattgtatttgaccgaaaaactagcgtgtttacattcttttattatgtatcatgagtttttacagtcaagccctccatactgactcatgataaacatggccatcttcgcatttggttctttaatatttacaggaaattccagtctcttttcatagatccacattaataaccgcctccttcccatggccacgggtcgtctgtccaggaccagtagactgtatctctggcattttcagcacgaaggggaccatactg

SEQ ID NO: 32519 - DNA, 109 bp, Unknown
  Description of Unknown: RightRegion for integrase B6520 sequence
aaaaagatcgtttttgaccgtaaaaccggcacttttactttcttttactacacattatgaggttttgcattacggccctccatactgactcatgataaacatggccatc

SEQ ID NO: 32520 - DNA, 260 bp, Unknown
  Description of Unknown: RightRegion for integrase B6521 sequence
tattctaaaattgacaacaatattgaaataacaatatatagtaaaattcccataaaataattttacaactgtagtgtacctaggaattggctcatattgaaattgtaggtgctatgtgcttacagcttagtgaaaatgctgaccctgaagaaattaaggctgccggttttgactcctatttcgtagaccatggaactggtgtatatccttgtagcgcttctggcgtgcctttcaatgcagcttgccttgcatcaaaaggt

SEQ ID NO: 32521 - DNA, 260 bp, Unknown
  Description of Unknown: RightRegion for integrase B6522 sequence
tctataagaggggttattaataaagtagtttgggatgggaaaaacataataatttcataactgtttaaagacacctcgtactcctggtgccccgattgcaaacacccctaataatactataaataatatcatagttggtaaactcggaatcttaccatataaaatttgagatactgtcattacaaagaatacttctgtaagaactgaaccacataaatgtatgtttgaacataatggtattgcaaaatccactatatctt

SEQ ID NO: 32522 - DNA, 260 bp, Unknown
  Description of Unknown: RightRegion for integrase B6523 sequence
aaaaagatcgtttttgaccgtaaaaccggcacttttactttcttttactacacattatgaggttttgcattacggcccaccatactgtaaaaactcatgataatatcattcaactattgctgcaataaaaaatacggaaacaatgcaggcattgtctccgcggaaaacatatgtttttgttctgctgtaagtgtttccactgttcaactggttataattccttctagacaatcgaattatagcacagtggatgcactctc

SEQ ID NO: 32523 - DNA, 260 bp, Unknown; identical to SEQ ID NO: 32505
  Description of Unknown: RightRegion for integrase B6524 sequence

SEQ ID NO: 32524 - DNA, 260 bp, Unknown
  Description of Unknown: RightRegion for integrase B6525 sequence
ggacagtctggaaataagaaaggctggaatttaaataaacaaagaaaggagcaaaattaatgtcaacaccacaaagagttgtaagggaaatacctgcactatatcgtggcaacatgagtaaagtaactgaaaaagaaaatgtcacatattatgcaagagtttcaacagatcatgatgagcaagaagaatcgtatgaaagacagcgttcacactttgagcagttaataaaagcacaccccgaatggaattatgttgaggga

SEQ ID NO: 32525 - DNA, 103 bp, Unknown
  Description of Unknown: RightRegion for integrase B6526 sequence
agacagatcaaactgtctctcggtgtcgtacattttgcgagtagcgggaactggatttgaaccagcgacaccacgggtatgaaccgtgtgctctagccaactg

SEQ ID NO: 32526 - DNA, 260 bp, Unknown
  Description of Unknown: RightRegion for integrase B6527 sequence
gccgatatttttgcagccttcggttcggattcgcgggctggcgcttcaccatatgtatagtacttgcaggatgcttgatggcctgcaatatctcatatttgcgtggagtataccacgcgcttaaaagagagctgccaatgtgcagctctttcttttattattttacctcattgcattcttgtcctcttgcatcgttgatgaactgtataaatttaacggaattttagctgacaaaaccatactattgtggtattgtatcc

SEQ ID NO: 32527 - DNA, 260 bp, Unknown
  Description of Unknown: RightRegion for integrase B6528 sequence
aaaaagattgtatttgaccgaaaaactagtgtgtttacattcttttattatgtatcatgagtttttacagtcaagcccaccatactgtaaaaactcatgataatatcattcaactattactgcaataaaaaatacggaaacaatgcaggcattgtctccgcggaaaacatatgtttttgttctgctgtaagtgtttccactgtccaactggtttatagttctttctaagcaattgaattatagcacagtggatgcactct

SEQ ID NO: 32528 - DNA, 260 bp, Unknown; identical to SEQ ID NO: 32503
  Description of Unknown: RightRegion for integrase B6529 sequence

SEQ ID NO: 32529 - DNA, 260 bp, Unknown
  Description of Unknown: RightRegion for integrase B6530 sequence
cattttgtctatgataaggaaaaggataaactggaagtgtacttcttcctacaaaaatagaaaagagtcttctatataccatagaagactcctttatcaattcgttcttttttatttatctttgcttttttccttatcagttgtctgttccttatctgaaggatagtcaaagatgctttctaaatcaaatcccatatcctacctcctttgaaaccttttctcttgttcatttgctagtatagactaatccgttttaaatg

SEQ ID NO: 32530 - DNA, 260 bp, Unknown
  Description of Unknown: RightRegion for integrase B6531 sequence
aaaaagattgtatttgaccgaaaaactagtgtgtttacattcttttattatgtatcatgagtttttacagtcaagcccaccatactgactcattataaacatcgccattttcgcatttggctctttaatatttacaggaaattccagtctcttttcatagatccacattaataaccgcctccttcccatggccacgggtcatctgtccaggaccagtagactgtatcttttgcattttcagcacgtaacggcccatactg

SEQ ID NO: 32531 - DNA, 260 bp, Unknown
  Description of Unknown: RightRegion for integrase B6532 sequence
aatttttttgctcatttaagtataccacttagcgacccgtgtgtcatggccttgtcgtagatggcctgcagctcttctttgctgaactggtagcgctcgttgcagaagtggcagcagacttcggcatgaccgtcctcaatgagggactcgaggtcggacttgccgaggctcagcaggacttcgctgatgcgctccttcgagcacgggcagcggaaggcgagctcggtcgtcgtcaggtagtcgacggcaaagccctgcaa

SEQ ID NO: 32532 - DNA, 260 bp, Unknown
  Description of Unknown: RightRegion for integrase B6533 sequence
tcttctattaacaagataatgatcactaaagatggaatccaagaaattgaatttaattaaaaaatagagttaagaccgaaatcttaactcttttatattgggctttttgtagtagcgtccaccaatattactaatataaacaatactagaataaatgcgaatccgccaccattttggttaactccgccattatttccttggcaacaagtatttgacaaaatatcacctcgatatattttatgcaaggtttactattttgg

SEQ ID NO: 32533 - DNA, 260 bp, Unknown
  Description of Unknown: RightRegion for integrase B6534 sequence
ctaatagataagattgtggttcttaatcgcgatgtaactatctactggtcattctcttaagggcacagatagtctcaacatgataagtgttgggaaacatatcgacgcaggctatcttttcaacgtgatagccgccttcctgcagtagcttcaggtctctcgcaaggcttgaaggcttgcaggaaatgtaaatcattctatctaccctaaacatatctattatcttgataattgatatgtttagggtagacacctaaagg

SEQ ID NO: 32534 - DNA, 260 bp, Unknown; identical to SEQ ID NO: 32505
  Description of Unknown: RightRegion for integrase B6535 sequence

SEQ ID NO: 32535 - DNA, 260 bp, Unknown
  Description of Unknown: RightRegion for integrase B6536 sequence
aaaaagattgtatttgaccgaaaaactagcgtgtttacattcttttattatgtatcatgagtttttacagtcaagcccaccatactgtaaaaactcatgataatatcattcaactattactgcaataaaaaatacggaaacaatgcaagcattgtctccgcggaaaacatatgtttttgttctgttgaaaatttttcaccgtccaactggtttataattctttctaagcaattgaattataacacagtgtatgtactctc

SEQ ID NO: 32536 - DNA, 109 bp, Unknown
  Description of Unknown: RightRegion for integrase B6537 sequence
tcaattagaaaggtaattaataagattacttggacaggtgaaaatataattatttcataactgtttaagtccaccccgaactcctggtgcccctattgcaaatactcct

SEQ ID NO: 32537 - DNA, 260 bp, Unknown
  Description of Unknown: RightRegion for integrase B6538 sequence
tcttctattaacaagataatgatcactaaagatggaatccaagaaattgaatttaattaaaaaatagagttaagaccgaaatcttaactcttttatattgggctttttgtagtagcgtccaccaatattactaatataaacaatactagaataaatgagaatccgccaccattttggttaactccgccattatttccttggcaacaagtatttgacaaaatatcacctcgatatattttatgcaaggtttactattttgg

SEQ ID NO: 32538 - DNA, 260 bp, Unknown
  Description of Unknown: RightRegion for integrase B6539 sequence
aaaaagatcgtatttgaccgcaaaaatggcgtatttacattcttttactatgtatcatgagtttttgcaatctagcccaccatactgactcattataaacatcgccattttcgcatttggctctttaatatttacaggaaattccagtctcttttcatagatccacattaataaccgcctccttcccatggccacgggtcatctgtccaggaccagtagactgtatcttttgcattttcagcacgtaacggcccatactg

SEQ ID NO: 32539 - DNA, 260 bp, Unknown
  Description of Unknown: RightRegion for integrase B6540 sequence
ctaatcaataaaattgttatctacccggatttaatagaaatccactgggctttccactaattagtacattccgccggcctgtggctgtgctggtaaaccttgagccggctccttgatgtctgctcaaggtttaccaatttatcatccgtttcaaactgcttacgatataataccacatttaatatagaagaaataggctaaatcacataaaaaaagagacttatggatcggatgctaaactatatagtgatctgagccct

SEQ ID NO: 32540 - DNA, 109 bp, Unknown
  Description of Unknown: RightRegion for integrase B6541 sequence
catatggtatatgacagggaaaatgataagctggagatatacttcttcctgcatatgtaattttacatattagcagcttttaacaaaagcactgcaaagccacttaaat

SEQ ID NO: 32541 - DNA, 260 bp, Unknown; identical to SEQ ID NO: 32497
  Description of Unknown: RightRegion for integrase B6542 sequence

SEQ ID NO: 32542 - DNA, 109 bp, Unknown; identical to SEQ ID NO: 32536
  Description of Unknown: RightRegion for integrase B6543 sequence

SEQ ID NO: 32543 - DNA, 109 bp, Unknown
  Description of Unknown: RightRegion for integrase B6544 sequence
catattgtatatgacagggaaaatgataagctggagatatacttcttcctgcatatgtaattttacatattagcagcttttaacaaaagcactgcaaagccacttaaat

SEQ ID NO: 32544 - DNA, 260 bp, Unknown
  Description of Unknown: RightRegion for integrase B6545 sequence
ctaatcaataaaattgttatctacccggatttaatagaaatccactgggctttccactaattagtacattccgccggcctgtggctgtgctggtaaaccttgagccggctccttgatgtcgactcaaggtttactaattaatcatccgtttcaaactgcttacgatataataccacacttaatatagaagaaataggctaaatcacattaattgagtgcgtccctataaatctctcgcctataattccggttataggagg

SEQ ID NO: 32545 - DNA, 260 bp, Unknown
  Description of Unknown: RightRegion for integrase B6546 sequence
tctataagaggtattattaacaaggtagtttgggatggaaaaaacataataatttcataactgtttaaagacacctcgtactcctggtgcccctattgcaaatactcctaataatactataaataatatcatagttggtaaactaggaattttaccatataaaatttgagatactgtcattacaaaaaatacttctgtaagaactgaaccacataaatgtatgtttgaacataatggtattgcaaaatccactatatctt

SEQ ID NO: 32546 - DNA, 260 bp, Unknown
  Description of Unknown: RightRegion for integrase B6547 sequence
cattgtatttacgacaaagaaaatgataaattagaagtttatttctttttacaaaaatagagggggtagaagcctcctctatttttaatctgtataactaatatccgattcttcttgcactgttggtatttccgtattatcaatattatcattcttatcataaaagcaaaatgctattccagctataattatcaaaaccgatgataaagctattataacaccatattttctctttgcttgaccatgaatactcctaacaa

SEQ ID NO: 32547 - DNA, 109 bp, Unknown
  Description of Unknown: RightRegion for integrase B6548 sequence
gtaaatgttatggtgtatgataaggcggaggatacgttaagcgtggagttttacatataattttttactatatcaaaatgaagtacagtcctccgtattgactgataat

SEQ ID NO: 32548 - DNA, 260 bp, Unknown
  Description of Unknown: RightRegion for integrase B6549 sequence
gtaaatgttatggtgtatgataaggcggaggatacgttaagcgtggagttttacatataattaaactgccgtttcttttatttttcaagaaacggcagtttataattttcttattcaaattcttgttgttctaacaattcattctctatttgtgataattcttctgtaccatctacctcctcattatcttctttaaaacgtgcaatttccctatctattctatccatttctatttttattttatcttgcatttcattgct

SEQ ID NO: 32549 - DNA, 109 bp, Unknown
  Description of Unknown: RightRegion for integrase B6550 sequence
catatggtatatgataaagaaaatgataaattggaagtgtacttcttcctgcaaaaataaatagcaaacattttacttactatatttttaccaagttgtcaaacccgca

SEQ ID NO: 32550 - DNA, 109 bp, Unknown
  Description of Unknown: RightRegion for integrase B6551 sequence
gtaaatgttatggtgtatgataaggcggaggatttgttgagcgtggaattttacatatgattttttactatatcaaaatgaagtacagtcctccgtattgactgataat

SEQ ID NO: 32551 - DNA, 109 bp, Unknown
  Description of Unknown: RightRegion for integrase B6552 sequence
aaaaaaattgtatttgaccgtgaaagtggcgtttttacgttcttttactatgtatcatgagtttttgcagtcaggtcctccatactgactcatgataaacatggccatc

SEQ ID NO: 32552 - DNA, 109 bp, Unknown
  Description of Unknown: RightRegion for integrase B6553 sequence
cattgtgtgtatgataaggaaaatgataagctggagatatacttctttctgcaaaaataaatagcaaacattttacttgctatattttttcaaagttatcaaacccgca

SEQ ID NO: 32553 - DNA, 109 bp, Unknown; identical to SEQ ID NO: 32549
  Description of Unknown: RightRegion for integrase B6554 sequence

SEQ ID NO: 32554 - DNA, 109 bp, Unknown
  Description of Unknown: RightRegion for integrase B6555 sequence
tatagtaaattgtccgcctgctttgcagggttcgacaaacgtaacttttggtggagatgaggggagtcgaacccctgtccgaaaatattgccatacaactttctccgag

SEQ ID NO: 32555 - DNA, 109 bp, Unknown
  Description of Unknown: RightRegion for integrase B6556 sequence
gagcggatgtgctgcaataagcgccattctgatatgcagctgcatgttgtttttttataacctgttatgtacaaggagaatataagaacaaactccaattccccgtcaa

SEQ ID NO: 32556 - DNA, 260 bp, Unknown
  Description of Unknown: RightRegion for integrase B6557 sequence
gagcggatgtgctgcaataagcgccattctgatatgcagttgcatgttgtttttttataatttattatgtacaagaagaatataagaacaaactccaattccccgttaatatcaaaacccccaatgcaaaaaccgcaaagtatatcatagatgctctgggcggcccggatggtgagctgggcgcatccatgcggtatatgcatcagcggtatattatgaaacagaaccgcgtcaagggcactttgacagatattgccacg

SEQ ID NO: 32557 - DNA, 109 bp, Unknown
  Description of Unknown: RightRegion for integrase B6558 sequence
cattgtgtgtatgataaggaaaatgataagctggagatatacttctttttacaaaaataaatagcaaacattttacttactatatttttaccaagttatcaaacccgca

SEQ ID NO: 32558 - DNA, 260 bp, Unknown
  Description of Unknown: RightRegion for integrase B6559 sequence
cattgtgtgtatgataaggaaaatgataagctggagatatacttctttttacaaaaataaatagcaaacattttacttgctatattttttcaaagttatcaaacccgcatatatactggtttttcaacagtataccttattgaagtatggtggaccggacggcgagcttggtgcttctatgcgttacatctcgcaaagatattctatgccatacagggaagttgccgggctgcttacagatatcggcactgaggagctgg

SEQ ID NO: 32559 - DNA, 260 bp, Unknown
  Description of Unknown: RightRegion for integrase B6560 sequence
attaacgaactatataaaagttcgcaccttaactcatgcggttcaccatatgatttataaaattaaagcaactatcaatgatagttgctttttgttttttgcttaataaaattttatttaccataaaattaccagctaaaaataaacaaaactcctctaaagcttgaaaattaaacctttttataaaatctccaaaaatcctattatcgctggtaaaaaacaactaaaatccttgtgtatcaatacttttaatagtataa

SEQ ID NO: 32560 - DNA, 260 bp, Unknown
  Description of Unknown: RightRegion for integrase B6561 sequence
attaacgaattatataaaagttcgcaccttaactcatgcggttcaccatatgatttataaaattaaagcaactatcaatgatagttgctttttgttttttgcttaataaaattttatttatcataaaattaccagctaaaattaagaaaaactcctctaaagcttgaaaattaaacctttttataaaatctccaaaaatcctattatcgctggtaaaaaataactaaaatccttgtatatcaatacttttaatagtataa

SEQ ID NO: 32561 - DNA, 260 bp, Unknown
  Description of Unknown: RightRegion for integrase B6562 sequence
cattgtgtgtatgataaggaaaatgataagctggagatatacttctttttacaaaaataaatagcaaacattttacttactatatttttaccaagttgtcaaacccgcatatatgctggtttttcagcagtataccttattgaagtatggtggaccggacggcgagcttggtgcttctatgcgttacatctcgcaaagatattctatgccatacagggaagttgccgggctgcttacagatatcggtacagaagcccctg

SEQ ID NO: 32562 - DNA, 109 bp, Unknown
  Description of Unknown: RightRegion for integrase B6563 sequence
gtaaatgttatggtatatgataaggcggaggatacgctgagcgtggaattttacatataattttttactatatcaaaatgaagtacagtcctccgtattgactgataat

SEQ ID NO: 32563 - DNA, 260 bp, Unknown
  Description of Unknown: RightRegion for integrase B6564 sequence
cattgcgtttacgacaaagaaaatgataaattagaagtttatttctttttacaaaaatagagggggtagaagcctcctctatttttaatctgtataactaatatccgattcttcttgcactgttggtatttccgtattatcaatattatcattcttatcataaaagcaaaatgctattccagctataattatcaaaaccgatgataaagctattataacaccatattttctctttgcttgaccatgaatactcctaacaa

SEQ ID NO: 32564 - DNA, 109 bp, Unknown
  Description of Unknown: RightRegion for integrase B6565 sequence
gtaaatgttatggtgtatgataaggcggaggatttgttgagcgtggaattttacatatgattttttactatatcaaaatgaagtacagtcctccatattgactgataat

SEQ ID NO: 32565 - DNA, 199 bp, Unknown
  Description of Unknown: RightRegion for integrase B6566 sequence
attaacgaactatataaaagttcgcaccttaactcatgcggttcaccatatgatttataaaattaaagcaactatcaatgatgtgcacccaaaatattggacatattaattaggctactaattgaaacttaattctgtattctacaggactaagtccttttagttttatctttatccgttttgtattataatattttat

SEQ ID NO: 32566 - DNA, 260 bp, Unknown
  Description of Unknown: RightRegion for integrase B6567 sequence
gaaagcgtgatatgcgaaaaaaacagagataacctggcaatttatttctatgaattttgattatatcaaaaagccgctcggaggtcctgacggtgagcttggtgcatccatgcgatatctgcaccaacgctacacctgtccgtatgataaagtaaccggtattctcacagacgtcggaacagaagaatctgcacacctgtgatggaattaatcaaaccaaagatcaactcctctttactgccaatctgatacaaagctca

SEQ ID NO: 32567 - DNA, 260 bp, Unknown
  Description of Unknown: RightRegion for integrase B6568 sequence
catatggtatatgataaagaaaatgataaattggaagtgtacttcttcctgcaaaaataaatagcaaacattttacttactatatttttaccaagttgtcaaacccgcatatatgctggcttttcagcagtataccttattgaagtatggtggaccggacggcgagcttggtgcttctatgcgttacatctcgcaaagatattctatgccatacagggaagttgccgggctgcttacagatatcggcactgaggagctgg

SEQ ID NO: 32568 - DNA, 260 bp, Unknown
  Description of Unknown: RightRegion for integrase B6569 sequence
attaacgaactatataaaagttcgcaccttaactcatgcggttcaccatatgatttataaaattaaagcaactatcaatgatagttgctttttgttttttgcttaataaaattttatttaccataaaattaccagctaaaaataaacaaaactcctctaaagcttgaaaattaaacctttttataaaatctcccaaaatcctattatcgctggtaaaaaacaactaaaatccttgtgtatcaatacttttaatagtataa

SEQ ID NO: 32569 - DNA, 109 bp, Unknown
  Description of Unknown: RightRegion for integrase B6570 sequence
atagttgataaaatcattattgatgaagataaaattgaaataaaattaaatatatggtaatttataattaataaaaaaatagtgggtatataacacctcagctaaagtt

SEQ ID NO: 32570 - DNA, 109 bp, Unknown; identical to SEQ ID NO: 32549
  Description of Unknown: RightRegion for integrase B6571 sequence

SEQ ID NO: 32571 - DNA, 109 bp, Unknown
  Description of Unknown: RightRegion for integrase B6572 sequence
attaacgaactatataaaagttcgcaccttaactcatgcggttcaccatatgatttataaaattaaagcaactatcattgatagttgctttttgttttttacttaataa

SEQ ID NO: 32572 - DNA, 260 bp, Unknown
  Description of Unknown: RightRegion for integrase B6573 sequence
attaacgaactatataaaagttcgcaccttaactcatgcggttcaccatatgtaaattagcgtcgtaattaaggttacgacgttttttatttattattattttttaatcagacgatttatgacatcatattttgacatctttataataaaaaaaataaaagtcattgccttagataaatagcaacgactttttaataattataaaccattaaaaattattattcattattagtagtaaaatttttataaaaattataggc

SEQ ID NO: 32573 - DNA, 109 bp, Unknown
  Description of Unknown: RightRegion for integrase B6574 sequence
gtaaatgttatggtgtatgataaggcggaggattcgttgagcgtggaattttacatatgattttttactatatcaaaatgaagtacagtcctccgtattgactgataat

SEQ ID NO: 32574 - DNA, 260 bp, Unknown
  Description of Unknown: RightRegion for integrase B6575 sequence
cattgtgtgtatgataaggaaaatgataagctggagatatacttctttttacaaaaatagaaggggaccccccttctatttctaatcggtatatactgtatcactattttcttctattgtttcaacctgatttgtatcaattctactgtctttattataaaaataaaatgcaactaatgtaatcaatattaaagtaacagaaaaagcaataataacccaatattttctatctgattgtccgtgaatacttcttatgaaat

SEQ ID NO: 32575 - DNA, 109 bp, Unknown
  Description of Unknown: RightRegion for integrase B6576 sequence
caaagaatgtgctaccgaaaacaggactctgatttgtcattgcacattgattttttatgatttgttatgtacaagtgagatatgatatcaaattgcaataccccgttcg

SEQ ID NO: 32576 - DNA, 260 bp, Unknown
  Description of Unknown: RightRegion for integrase B6577 sequence
atcgacaatttatataaaagttcgcaagctgacgcatgtggttcaccatatgatttataaaattaaagcaactatcaatgatagttgctttttgttttttgcttaataaaattttatttaccataaaattaccagctaaaaataaacaaaactcctctaaagcttgaaaattaaacctttttataaaatctccaaaaatcctattatcgctggtaaaaaacaactaaaatccttgtatatcaatacttttaatagtataa

SEQ ID NO: 32577 - DNA, 260 bp, Unknown
  Description of Unknown: RightRegion for integrase B6578 sequence
caaagaatgtgctaccgaaaacaggactctgatttgtcattgcacattgattttttatgatttgttatgtacaagtgagatatgatatcaaattgcaataccccgttcgtatcaaaaccccaaacgccaaaacggcgaagtatatcatttcgcagcttggcggaccagacggcgagcttgccgcctccctccgctatatgaaccagcgctattccatgaagctggataaggtcaagggagtattgactgatatttccacg

SEQ ID NO: 32578 - DNA, 260 bp, Unknown
  Description of Unknown: RightRegion for integrase B6579 sequence
gtaaatgttatggtgtatgataaggcggaggatacgttaagcgtggagttttacatataattttttactatatcaaaatgaagtacagtcctccgtattgactgataatcattgccgcaagtgccggattgggattcttaatatgaatcggaaactgtaatcttttttcataattccacatcgtttaaccctccatttcccacggcattggtgttgcaacccagttccagtagttttcatttgttacatgataaaaactt

SEQ ID NO: 32579 - DNA, 260 bp, Unknown
  Description of Unknown: RightRegion for integrase B6580 sequence
cattgtgtctacgataaggaaaatgataggctggaagtatatttctttttacaaaaatagaaaggaataatcccttctatttttaattaatattatatattttccacaatgtatctattaaaaagcaaaaattcttattcacattttttgcttgttctaatgctgttaattacaggtattgctatttcctgcattacctgttttagctcatcctgtgtagcttttctctcctgtgcttcaacaagatttactaccccgtt

SEQ ID NO: 32580 - DNA, 260 bp, Unknown
  Description of Unknown: RightRegion for integrase B6581 sequence
attaacgaactatataaaagttcgcaccttaactcatgcggttcaccatatgatttataaaattaaagcaactatcaatgatagttgctttttgttttttgcttaataaaattttatttatcataaaattaccagctaaaattaagaaaaacttctctaaagcttgaaaaaaattaaacctttttataaaatctccaaaaatcctattatcgctgctaaaaaacaactaaaatccttgtatatcaatacttttaatagta

SEQ ID NO: 32581 - DNA, 109 bp, Unknown
  Description of Unknown: RightRegion for integrase B6582 sequence
gagcggatgtgctgcaataagcgccattctgatatgcagctgcatgttgtttttttataacttgttatgtacaagaagaatataagaacaaactccaattccccgttaa

SEQ ID NO: 32582 - DNA, 260 bp, Unknown
  Description of Unknown: RightRegion for integrase B6583 sequence
attaacgaactatataaaagttcgcaccttaactcatgcggttcaccatatgtaaattagcgtcgtaatcaaagttacggcgttttttgtttattattattttttaaatcagacgatttatgacatcatattttgacatctttataattaaaaaaataaaagtcattgctttagacaaatgttttatagcaatgactttttaacaattataaatcattaaaaattattatttattattagcagtaaaatctttataaaaa

SEQ ID NO: 32583 - DNA, 260 bp, Unknown
  Description of Unknown: RightRegion for integrase B6584 sequence
attaacgaattatataaaagttcgcaccttaactcatgcggttcaccatatgtaaattagcgtcgtaattaaggttacgacgttttttatttattattattttttaatcagacgatttatgacatcatattttgacatctttataataaaaaaaataaaagtcattgccttagataaatagcaacgactttttaataattataaaccattaaaaattattattcattattagtagtaaaatttttataaaaattataggc

SEQ ID NO: 32584 - DNA, 260 bp, Unknown; identical to SEQ ID NO: 32572
  Description of Unknown: RightRegion for integrase B6585 sequence

SEQ ID NO: 32585 - DNA, 183 bp, Unknown
  Description of Unknown: RightRegion for integrase B6586 sequence
gacaatattatatacaacaaaaaagaaaacacattatatgtcacatttaaagaagtatagagtccactcaatagtggacttttttattgaaaacatggactttttaacacttacaccaaattgtctttatatcgataatatcagggtgcatattttcatagataaatttagctgcactaacaa

SEQ ID NO: 32586 - DNA, 109 bp, Unknown
  Description of Unknown: RightRegion for integrase B6587 sequence
gtaaatgttatggtgtatgataaggcggaggatacgctgagcgtggaattttacatataattttttactatatcaaaatgaagtacagtcctccgtattgactgataat

SEQ ID NO: 32587 - DNA, 260 bp, Unknown
  Description of Unknown: RightRegion for integrase B6588 sequence
atcgacaatctatacaaaagttcgcaagccgacgcatgtggttcaccatataatttataaaattaaagcaactatcattgatagttgctttttatttttcctaaataactaataaccttttatttattctcaaattttaccaactaaaatcaaacaaaactacgctaaagcttgaaaattaaacctttttataaaatctccaaaaatcctattatcgctggtaaaaaacaactaaaatccttgtgtatcaatacttttaa

SEQ ID NO: 32588 - DNA, 260 bp, Unknown
  Description of Unknown: RightRegion for integrase B6589 sequence
cattgtgtctacgataaggaaaatgataggctggaagtatatttctttttacaaaaatagaagggaataatcccttctatttttaattaatattatatattttccacaatgtatctattaaaaagcaaaaattcttattcacattttttgcttgttctaatgctgttaattacaggtattgctatttcctgcattacctgttttagctcatcctgtgtagcttttctctcctgtgcttcaacaagatttactaccccgtt

SEQ ID NO: 32589 - DNA, 109 bp, Unknown
  Description of Unknown: RightRegion for integrase B6590 sequence
gagcggatgtgctgcaataagcgccattctgatatgcagttgcatgttgtttttttataatttattatgtacaagaagaatataagaacaaactccaattccccgttaa

SEQ ID NO: 32590 - DNA, 109 bp, Unknown
  Description of Unknown: RightRegion for integrase B6591 sequence
aggataattttcagcaaggaaacttttgaattaaagttctatctgttcttaaaattgtaaaagcctttattttaggggagttttttaatcacaaggtatcgaatacgga

SEQ ID NO: 32591 - DNA, 260 bp, Unknown
  Description of Unknown: RightRegion for integrase B6592 sequence
cacgcagacggaacagtgaccgtaaacttgggcgtacatattaatggttgcggggactagacttgaaccagcgaccttcgggttatgagtagtatattatattttactcacactttcactttataccgcaaaaccgcataataaagccatttttataactattgcttttcgcattttaccgtactttgtccgctgtttttatatatgtagcggacaaatagcggacaggattttatattgctatctaatatacattatca

SEQ ID NO: 32592 - DNA, 260 bp, Unknown
  Description of Unknown: RightRegion for integrase B6593 sequence
attaacgaactatataaaagttcgcaccttaactcatgcggttcaccatatgtaaattagcgtcgtaatcaaagttacggtgttttttgtttattattattttttaaatcagacgatttatgacatcatattttgacatctttataattaaaaaaataaaagtcattgctttagacaaatgttttatagcaatgactttttaacaattataaatcattaaaaattattatttattattagcagtaaaatctttataaaaa

SEQ ID NO: 32593 - DNA, 109 bp, Unknown; identical to SEQ ID NO: 32573
  Description of Unknown: RightRegion for integrase B6594 sequence

SEQ ID NO: 32594 - DNA, 260 bp, Unknown
  Description of Unknown: RightRegion for integrase B6595 sequence
caaagaatgtgctgtaataaccggaattccgatctgacactcgatgcggtgtttttataaccttatatgtgcaagtaatatattggaataaactgcaatatctttcatgtacatataaccataggggaaacaaaagctcagtcgcttgttttttatagaacagaatgtacaaaacgaactacaatatcttgtgcattcctacaaagtcacgcattgcgtgaactttttgtattatttctattgacttatcacccgttggg

SEQ ID NO: 32595 - DNA, 109 bp, Unknown; identical to SEQ ID NO: 32549
  Description of Unknown: RightRegion for integrase B6596 sequence

SEQ ID NO: 32596 - DNA, 260 bp, Unknown
  Description of Unknown: RightRegion for integrase B6597 sequence
caaagaatgtgctaccgaaaacaggactctgatttgtcattgcacattgattttttatgatttgttatgtacaagtgagatatgatatcaaattgcaataccccgttcgtatcaaaaccccaaacgccaaaacggcgaagtatatcatttcgcagcttggaggaccagacggcgagcttgccgcctctctccgctatatgaaccagcgctattccatgaagctggataaggtcaagggagtattgactgacatttccacg

SEQ ID NO: 32597 - DNA, 260 bp, Unknown
  Description of Unknown: RightRegion for integrase B6598 sequence
attaacgaactatataaaagttcgcaccttaactcatgcggttcaccatatgatttataaaattaaagcaactatcattgatagttgctttttgttttttacttaataaaattttatttaccataaaattaccagctaaaattaagaaaaacttctctaaagcttgaaaattaaatctttttataaaatctctaaaaatcctattatcgctggtaaaaaacaactaaaatccttgtatatcaatacttttaatagtataa

SEQ ID NO: 32598 - DNA, 109 bp, Unknown
  Description of Unknown: RightRegion for integrase B6599 sequence
gtaaatgttatggtatatgataaggcggaggatacgctgagcgtggaattttacatataaaaacgactatccactgttaaaattcccctatataatacagataagggca

SEQ ID NO: 32599 - DNA, 109 bp, Unknown; identical to SEQ ID NO: 32573
  Description of Unknown: RightRegion for integrase B6600 sequence

SEQ ID NO: 32600 - DNA, 260 bp, Unknown
  Description of Unknown: RightRegion for integrase B6601 sequence
cgcttgtgtataggttgggggatgcctgatggcgtcccctttccgttcccattgccgtgaaacgccgtattttgcgttttaaggcgttttaagcccgttggggtactcgtgtacccctcgggcttttttcgtgccttaaaacgcctctgaagcggtctgagggatattcgagcgcccatgtgcatctcgcatccgctcgatgcaagggtggccgccctgcgggcggcagttggatgcgggtggacgtacagaaggggtgc

SEQ ID NO: 32601 - DNA, 260 bp, Unknown
  Description of Unknown: RightRegion for integrase B6602 sequence
cattgtgtgtatgataaggaaaatgataagctggagatatacttctttttacaaaaataaatagcaaacattttacttgctatattttttcaaagttatcaaacccgcatatatactggtttttcaacagtataccttattgaagtatggtggaccggacggcgagcttggtgcttctatgcgttacatctcgcaaagatattctatgccatacagggaagttgccgggctgcttacagatatcggcactgaggagctag

SEQ ID NO: 32602 - DNA, 260 bp, Unknown
  Description of Unknown: RightRegion for integrase B6603 sequence
cattgtgtgtatgacaaagagaatgataagctggaagtatatttctttttgcaaaaatagaagggattattcccttctattttttaatcaatattatatattttccacaatgtatctattaaaaagcaaaattcttattcacattttttgcttgttctaatcctgttaattacaggtattgctatttcctgcattacctgtttcagctcatcctgtgtagcttttctttcctgtgcttcaacaagatttactaccccgtt

SEQ ID NO: 32603 - DNA, 260 bp, Unknown
  Description of Unknown: RightRegion for integrase B6604 sequence
catatggtatatgataaagaaaatgataaattggaagtgtacttcttcctgcaaaaataaatagcaaacattttacttactatatttttaccaagttgtcaaacccgcatatatgctggcttttcagcagtataccttattgaagtatggtggaccggacggcgagcttggtgcttctatgcgttacatctcgcaaagatattctatgccatacagggaagttgccgggctgcttacagatatcggcactgaggaattag

SEQ ID NO: 32604 - DNA, 260 bp, Unknown
  Description of Unknown: RightRegion for integrase B6605 sequence
cattgtgtttacgataaggaaaatgacaagttggaagtgtatttctttttacaaaaatagaagggaataatcccttctatttttaattaatattatatatttcccacaatgtatctattaaaaagcaaaaattcttattcacattttttgcttgttctaatgctgttaattaaaggtattgctatttcctgcattacctgttttagctcatcttgtgtagcttttctctcctgtgcttcaacaagatttactaccccgtt

SEQ ID NO: 32605 - DNA, 260 bp, Unknown
  Description of Unknown: RightRegion for integrase B6606 sequence
cattgtgtatatgataaagagaatgacaagttggaagtgtatttcttcttgcaaaaatagaagggagctttcccttctatttttaatcagtatatattgtatcattattttcttctattgtttgaacttgatctacatctattctatcgtctttgttataacaataaaatgccgccaatgcaattattattaaagtgatagaaaaagcaataataacccaatatttcctatctaattgtccatgaatacttcttataaaa

SEQ ID NO: 32606 - DNA, 260 bp, Unknown
  Description of Unknown: RightRegion for integrase B6607 sequence
cattgtgtatatgataaagagaatgacaagttggaagtgtatttcttcttgcaaaaataagaaaaggtgagcttttactcaccttttctttattatttctttattacattccatgtttcaattgcatctttaataaattgatataaatacattaacacaatgattactattaatacaacacttactattaaagtaacaatatttacattaataggaactaaatcctttaacgatgttattatttctgttatttgattaat

SEQ ID NO: 32607 - DNA, 109 bp, Unknown; identical to SEQ ID NO: 32549
  Description of Unknown: RightRegion for integrase B6608 sequence

SEQ ID NO: 32608 - DNA, 260 bp, Unknown; identical to SEQ ID NO: 32567
  Description of Unknown: RightRegion for integrase B6609 sequence

SEQ ID NO: 32609 - DNA, 260 bp, Unknown
  Description of Unknown: RightRegion for integrase B6610 sequence
cattgtgtgtatgataaagagaatgataagttggaagtgtatttcttcttacaaaaatagaagggaactttcccttctatttttaatcagtatatattgtatcattattttcttctattgtttgaacttgatctacatctattctatcgtctttgttataacaataaaatgctgccaatgcgattattattaaagtgatagaaaaagcaataataacccaatatttcctatctaattgtccatgaatacttcttataaaa

SEQ ID NO: 32610 - DNA, 260 bp, Unknown
  Description of Unknown: RightRegion for integrase B6611 sequence
cattgtgtgtatgacaaagagtatgataagctggaagtatatttctttttgcaaaaatagaagggattattcccttctattttttaatcaatattatatattttccacaatgtatctattaaaaagcaaaattcttattcacattttttgcttgttctaatcctgttaattacaggtattgctatttcctgcattacctgtttcagctcatcctgtgtagcttttctttcctgtgcttcaacaagatttactaccccgtt

SEQ ID NO: 32611 - DNA, 260 bp, Unknown
  Description of Unknown: RightRegion for integrase B6612 sequence
cattgtgtttacgataaggaaaatgacaagttagaagtgtatttctttttacaaaaatagaagggaataatcccttctatttttaattaatattatatatttcccacaatgtatctattaaaaagcaaaaattcttattcacattttttgcttgttctaatgctgttaattacaggtattgctatttcctgcattacctgttttagctcatcttgtgtagcttttctctcctgtgcttcaacaagatttactaccccgtt

SEQ ID NO: 32612 - DNA, 260 bp, Unknown
  Description of Unknown: RightRegion for integrase B6613 sequence
attgtatttgacaaagagaataaaacattagattttcactattacataaaagaagattagatcattgagatattttttagaaatcatgtatattgtttttccgagatacatatgctataatgccagtaggcaaaatgatagcaatgtttcaagttgaaacaaaaaagaaaaaacctcagtacggcaatactggggttttttcttgtctataatgggacaagatccacggttaggttgtacgctatttatgcctgtctaac

SEQ ID NO: 32613 - DNA, 260 bp, Unknown; identical to SEQ ID NO: 32611
  Description of Unknown: RightRegion for integrase B6614 sequence

SEQ ID NO: 32614 - DNA, 260 bp, Unknown; identical to SEQ ID NO: 32605
  Description of Unknown: RightRegion for integrase B6615 sequence

SEQ ID NO: 32615 - DNA, 260 bp, Unknown
  Description of Unknown: RightRegion for integrase B6616 sequence
catatggtatatgataaagaaaatgataaattggaagtgtatttctttctgcaaaaataaatagcaaacattttacttgctatatttttacaaagttgtcaaacctgcatatatgctggtttttcagcagtataccttattgaagtatggtggaccggacggcgagcttggtgcttctatgcgttacatctcgcaaagatattctatgccatacagggaagttgccgggctgcttacagatatcggcactgaggagctgg

SEQ ID NO: 32616 - DNA, 260 bp, Unknown
  Description of Unknown: RightRegion for integrase B6617 sequence
cattgtgtgtatgataaagagaatgataagttagaagtgtatttcttcttgcaaaaatagaagggaactttcccttctatttttaatcagtatatattgtatcattattttcttctattgtttgaacttgatctacatctattctatcgtctttgttataacaataaaatgctgccaatgcaattattattaaagtgatagaaaaagcaataataacccaatatttcctatctaattgtccatgaatacttcttataaaa

SEQ ID NO: 32617 - DNA, 260 bp, Unknown
  Description of Unknown: RightRegion for integrase B6618 sequence
aatggtgcaggaaaaacaccacaaaatttatacccacgtgaaatagaactaatttcttaaatttagatgttagaagggccattcaggccctttttaatttatcgtatttttcttaattatttttctttataatagttcattgaactaattcctaatagcgctccaatgaatagatccaccgcggatattgttcccgctacttcctttgcatatggaaatccccatatacccgccaccgctacatataaagttgcagcagc

SEQ ID NO: 32618 - DNA, 260 bp, Unknown; identical to SEQ ID NO: 32611
  Description of Unknown: RightRegion for integrase B6619 sequence

SEQ ID NO: 32619 - DNA, 260 bp, Unknown
  Description of Unknown: RightRegion for integrase B6620 sequence
catatggtatatgataaagaaaatgataaattggaagtgtacttcttcctgcaaaaataaatagcaaacattttacttactatatttttaccaagttgtcaaacccgcatatatgctggcttttcagcagtataccttattgaagtatggtggcccggacggcgagcttggtgcttctatgcgttacatctcgcaaagatattctatgccatacagggaagttgccgggctgcttacagatatcggcactgaggagctgg

SEQ ID NO: 32620 - DNA, 109 bp, Unknown; identical to SEQ ID NO: 32549
  Description of Unknown: RightRegion for integrase B6621 sequence

SEQ ID NO: 32621 - DNA, 260 bp, Unknown
  Description of Unknown: RightRegion for integrase B6622 sequence
cattgtgtatatgataaagagaatgacaagttggaagtgtatttcttcttgcaaaaataaaagagagactgataagcaatcagtctctctaagtcatttatgaatcacttttatcgttgttatccttctgatcttcatgttcgtcttccgcaggatagtcaaaaatgctctttaaatcaaatcccatattgtacctcctttgaagccttaatatttaatgcttatttagtataacttattaattttttgttgtcaatatt

SEQ ID NO: 32622 - DNA, 260 bp, Unknown
  Description of Unknown: RightRegion for integrase B6623 sequence
attgtatttgacaaagagaataaaacattagattttcactattacataaaagaagattagatcattcagatgtttttagaaatcatgtatattgtttttccgagatacatatgctataatgccagtaggcaaaatgatagcatatgtttcaagttgaaacaaaaaagaaaaaacctcagtactgcaatactggggttttttcttgtctataatgggacaagatccacggttaggttgtacgctatttatgcctgtctaac

SEQ ID NO: 32623 - DNA, 260 bp, Unknown; identical to SEQ ID NO: 32611
  Description of Unknown: RightRegion for integrase B6624 sequence

SEQ ID NO: 32624 - DNA, 260 bp, Unknown
  Description of Unknown: RightRegion for integrase B6625 sequence
cattgtgtatatgataaagagaatgacaagttggaagtgtatttcttcttgcaaaaataaaagagagactgataagcaatcagtctctctaagtcatctatgaatcacttttatcgttgttatccttctgatcttcatgttcgtcttccgcaggatagtcaaaaatgctctttaaatcaaatcccatattgtacctcctttgaagccttaatatttaatgcttatttagtataacttattaattttttgttgtcaatatt

SEQ ID NO: 32625 - DNA, 260 bp, Unknown
  Description of Unknown: RightRegion for integrase B6626 sequence
agcggcgaaaacaataccgctactatttcggatttggacttatcaagtccaccattttaatcgctggtcgaacacctgaatgcgagatcattgtcttgcgttatggtttctggctggcactcgatttgaccgttcaggtttgacctgggcggtcttttcgtttagggcggccgagactcctcagcaatgctcttccagtcgattctctttccgcaatcagggcagaatgagaaacgggtcaaatccgtgctgcgccgtcg

SEQ ID NO: 32626 - DNA, 109 bp, Unknown
  Description of Unknown: RightRegion for integrase B6627 sequence
catatggtatatgataaagaaaatgataaattggaagtgtacttcttcctgcaaaaataaatagcaaacattttacttactatatttttaccaaattgtcaaacccgca

SEQ ID NO: 32627 - DNA, 109 bp, Unknown
  Description of Unknown: RightRegion for integrase B6628 sequence
gagaaaatagtttacaataaaagagaaggaattattgacttttattattactacagttaaaccactatatttttttcctctacatacataccctgttgcaatatggtca

SEQ ID NO: 32628 - DNA, 260 bp, Unknown; identical to SEQ ID NO: 32602
  Description of Unknown: RightRegion for integrase B6629 sequence

SEQ ID NO: 32629 - DNA, 260 bp, Unknown; identical to SEQ ID NO: 32611
  Description of Unknown: RightRegion for integrase B6630 sequence

SEQ ID NO: 32630 - DNA, 260 bp, Unknown; identical to SEQ ID NO: 32611
  Description of Unknown: RightRegion for integrase B6631 sequence

SEQ ID NO: 32631 - DNA, 260 bp, Unknown
  Description of Unknown: RightRegion for integrase B6632 sequence
attgtatttgacaaagagaataaaacattagattttcactattacataaaagaagattagatcattcagatgtttttagaaatcatgtatattgtttttccgagatacatatgctataatgccagtaggcaaaatgatagcaatgtttcaagttgaaacaaaaaaagaaaaaacctcagtactgcaatactggggttttttcttgtctataatgggacaagatccacggttaggttgtacgctatttatgcctgtctaac

SEQ ID NO: 32632 - DNA, 260 bp, Unknown; identical to SEQ ID NO: 32621
  Description of Unknown: RightRegion for integrase B6633 sequence

SEQ ID NO: 32633 - DNA, 260 bp, Unknown; identical to SEQ ID NO: 32611
  Description of Unknown: RightRegion for integrase B6634 sequence

SEQ ID NO: 32634 - DNA, 109 bp, Unknown
  Description of Unknown: RightRegion for integrase B6635 sequence
cattgtgtgtatgataaggaaaatgataagctggagatatacttctttttacaaaaataaatagcaaacattttacttgctatattttttcaaagttatcaaacccgca

SEQ ID NO: 32635 - DNA, 109 bp, Unknown; identical to SEQ ID NO: 32549
  Description of Unknown: RightRegion for integrase B6636 sequence

SEQ ID NO: 32636 - DNA, 109 bp, Unknown
  Description of Unknown: RightRegion for integrase B6637 sequence
ggcgctataggtccaggtggcgaggtgttcgaccgaatgaacgccagctccaccatgtgaatcccagcctcgcatatgcgaggctttttctttttcgcacattgtgctt

SEQ ID NO: 32637 - DNA, 260 bp, Unknown
  Description of Unknown: RightRegion for integrase B6638 sequence
catatggtatatgataaagaaaatgataaattggaagtgtatttctttctgcaaaaataaatagcaaacattttacttgctatatttttacaaagttgtcaaacctgcatatatgctggtttttcagcagtataccttattgaagtatggtggaccggacggcgagcttggtgcttctatgcgttacatctcgcaaagatattctatgccatacagggaagttgccgggctgcttacagatatcggcactgaggaattag

SEQ ID NO: 32638 - DNA, 260 bp, Unknown; identical to SEQ ID NO: 32611
  Description of Unknown: RightRegion for integrase B6639 sequence

SEQ ID NO: 32639 - DNA, 260 bp, Unknown
  Description of Unknown: RightRegion for integrase B6640 sequence
cattgtgtctacgataaggaaaatgataggctggaagtatatttctttttacaaaaatagaagggaataatcccttctatttttaattaatattatatattttccacaatgtatctattaaaaagcaaaaattcttattcacattttttgcttgttctaatgctgttaattacaggtattgctatttcctgcattacctgttttagctcatcttgtgtagcttttctctcctgtgcttcaacaagatttactaccccgtt

SEQ ID NO: 32640 - DNA, 260 bp, Unknown
  Description of Unknown: RightRegion for integrase B6641 sequence
cattgtgtatatgataaagagaatgacaagttggaagtgtatttcttcttgcaaaaatagaagggaactttcccttctatttttaatcagtatatattgtatcattattttcttctattgtttgaacttgatctacatctattctatcgtctttgttataacaatgaaatgctgccaatgcaattattattaaagtgatagaaaaagcaataataacccaatatttcctatctaattgtccatgaatacttcttataaaa

SEQ ID NO: 32641 - DNA, 109 bp, Unknown
  Description of Unknown: RightRegion for integrase B6642 sequence
attgtatttgacaaagagaataaaacattagattttcactattacataaaagaagattagatcattcagatgtttttagaaatcatgtatattgtttttccgagataca

SEQ ID NO: 32642 - DNA, 260 bp, Unknown
  Description of Unknown: RightRegion for integrase B6643 sequence
cattgtgtttacgataaggaaaatgacaagttggaagtgtatttctttttacaaaaatagaagggaataatcccttctatttttaattaatattatatatttcccacaatgtatctattaaaaagcaaaaattcttattcacattttttgcttgttctaatgctgttaattacaggtattgctatttcctgcattacctgttttagctcatcttgtgtagcttttctctcctgtgcttcaacaagatttactaccccgtt

SEQ ID NO: 32643 - DNA, 101 bp, Unknown
  Description of Unknown: RightRegion for integrase B6644 sequence
agcggcgaaaacaataccgctactatttcggatttggacttatcaagtccaccaacataaaagccacctgaaaacttacgtttcaggtggcttttgctata

SEQ ID NO: 32644 - DNA, 260 bp, Unknown; identical to SEQ ID NO: 32616
  Description of Unknown: RightRegion for integrase B6645 sequence

SEQ ID NO: 32645 - DNA, 260 bp, Unknown
  Description of Unknown: RightRegion for integrase B6646 sequence
agcggcgaaaacaataccgctactatttcggatttggacttatcaagtccaccaatttaatcgcaggtcgaacccctgaggtgacgatagtcgttctgccttacggtttcgtacttgcgacccagattaaggataggctttaagcctgtcctttttctttaggtagtcgagtagcgcgtgtaacaaagattccctatatatacatgtaatgcgagggggcgacgagattgcgccttgagtccctttactttttcaaaaaa

SEQ ID NO: 32646 - DNA, 260 bp, Unknown
  Description of Unknown: RightRegion for integrase B6647 sequence
attgtatttgacaaagagaataaaacattagattttcactattacataaaagaagattagatcatttcagattttttagaaatcatgtatattgtttttccgagatacatatgctataatgccagtaggcaaaatgatagcaatgtttcaagttgaaacaaaaaagaaaaaaacctcagtacggcaatactggggttttttcttgtctataatgggacaagatccacggttaggttgtacgctatttatgcctgtctaac

SEQ ID NO: 32647 - DNA, 260 bp, Unknown
  Description of Unknown: RightRegion for integrase B6648 sequence
ccccgggcggattcgaaccgtcgacacgcggattatgattccgctgctctaaccaactgagctaccccgccatcgggttcgagctatttaataataaattcttcccgccttgtcaatagctatttttaaaattaatgtttattgcacaatctttttgccccgccttgcattctccttttccgtgattatctagcttagataattaagttatagacttaaggagagattgaaacatgcggcacaaaacattattggtctgg

SEQ ID NO: 32648 - DNA, 260 bp, Unknown
  Description of Unknown: RightRegion for integrase B6649 sequence
attgtatttgacaaagagaataaaacattagattttcactattacataaaagaagattagatcatttcagattttttagaaatcatgtatattgtttttccgagatacatatgctataatgccagtaggcaaaatgatagcaatgtttcaagttgaaacaaaaaagaaaaaaacctcagtactgcaatactggggttttttcttgtctataatgggacaagatccacggttaggttgtacgctatttatgcctgtctaac

SEQ ID NO: 32649 - DNA, 260 bp, Unknown
  Description of Unknown: RightRegion for integrase B6650 sequence
ttatttgatcatatcacttataataaaaaagaaaatacccttgaaatcgtttataaataaagcgattattatttgtactttatcagtataccttttggacttattccctacaaggtctccacgtttacaatattcactagtactttgtgcaactccttgccataatttgcaaccaataaaatccgtatcatattccccatttacatttttataagttcgaggtaccgctaaagtaatacgtgtaagtttctttccagatt

SEQ ID NO: 32650 - DNA, 260 bp, Unknown
  Description of Unknown: RightRegion for integrase B6651 sequence
tatgacaatgaaaaagatactcttgatatatactttagattaatagaaaaaagcctgtaaatacaggctttttaatgattataccttacggaagtacggtggtccatacttctgtaaggtatagtgttcaaaaaatcaggttttatcaggctttatagatagtctggttggtttttctatctacaatttcaccttttatttggttggcatttctaacagcatatttatatgttgtatatgcgccatactgtttacctttt

SEQ ID NO: 32651 - DNA, 260 bp, Unknown; identical to SEQ ID NO: 32646
  Description of Unknown: RightRegion for integrase B6652 sequence

SEQ ID NO: 32652 - DNA, 260 bp, Unknown
  Description of Unknown: RightRegion for integrase B6653 sequence
cgcattgtatgggacaaggcgaagaatcttttgcagatttattatcgcctgatcctctaaatttttctccaaatcatagcacgttacagtatggaggcccttatatcaacacactatagaaattgctacatatcatgcctttttataaagtatctgtactctgttttagatcacatcatacgtttccataaagatgtccggtttacaaggataaaactcgccgtgtacacccttaatgatgtagtcacccacacgggcct

SEQ ID NO: 32653 - DNA, 260 bp, Unknown; identical to SEQ ID NO: 32646
  Description of Unknown: RightRegion for integrase B6654 sequence

SEQ ID NO: 32654 - DNA, 260 bp, Unknown
  Description of Unknown: RightRegion for integrase B6655 sequence
attgtatttgacaaagagaataaaacattagattttcactattacataaaagaagattagatcatttcagattttttagaaatcatgtatattgtttttccgagatacatatgctataatgccagtaggcaaaatgatagcaatgtttcaagttgaaacaaaaaaagaaaaaacctcagtacggcaatactggggttttttcttgtctataatgggacaagatccacggttaggttgtacgctatttatgcctgtctaac

SEQ ID NO: 32655 - DNA, 109 bp, Unknown
  Description of Unknown: RightRegion for integrase B6656 sequence
attgtatttgacaaagagaataaaacattagattttcactattacataaaagaagattagatcatttcagattttttagaaatcatgtatattgtttttccgagataca

SEQ ID NO: 32656 - DNA, 109 bp, Unknown; identical to SEQ ID NO: 32655
  Description of Unknown: RightRegion for integrase B6657 sequence

SEQ ID NO: 32657 - DNA, 260 bp, Unknown; identical to SEQ ID NO: 32646
  Description of Unknown: RightRegion for integrase B6658 sequence

SEQ ID NO: 32658 - DNA, 260 bp, Unknown
  Description of Unknown: RightRegion for integrase B6659 sequence
tatttttcgtccagtgttgcaaatggcagtgcattattatgctggtcaaataatgcctgaaccatgggcatcatggtataaaggatattaaagcggtgtttatggaggaagctgtatgattatatcatgtaataatattcgtgaaattgaaaatatcaatttgcatgatgcgtatattgaaaatgtaatctataatcattccaataaggtaattaatgttgagttagaaagtgaatgggaaaaaactgattatgatttga

SEQ ID NO: 32659 - DNA, 260 bp, Unknown
  Description of Unknown: RightRegion for integrase B6660 sequence
tatgacaacgaaaaagatactcttgatatatactttagattaatagaaaaaagcccgtaaatacaggctttttaatgattataccttacggaagtacggtggtccggatggtgaggcaagtgcaagtatgcgatatatgtcacagcgttattcaataggtgacaggcaggttgcaggagtccttaccgatatcgctacagaagaattggcacattgatgttggatattgtagcaaaatgctttcattatgttattttttt

SEQ ID NO: 32660 - DNA, 260 bp, Unknown; identical to SEQ ID NO: 32646
  Description of Unknown: RightRegion for integrase B6661 sequence

SEQ ID NO: 32661 - DNA, 109 bp, Unknown; identical to SEQ ID NO: 32655
  Description of Unknown: RightRegion for integrase B6662 sequence

SEQ ID NO: 32662 - DNA, 109 bp, Unknown
  Description of Unknown: RightRegion for integrase B6663 sequence
aaggacattgtttttgaccgcaaaaaggggcatttatatattcacttttatatatcataggttattacaatccggcccgccgtactggctcattataaactgggccatc

SEQ ID NO: 32663 - DNA, 260 bp, Unknown; identical to SEQ ID NO: 32612
  Description of Unknown: RightRegion for integrase B6664 sequence

SEQ ID NO: 32664 - DNA, 260 bp, Unknown; identical to SEQ ID NO: 32611
  Description of Unknown: RightRegion for integrase B6665 sequence

SEQ ID NO: 32665 - DNA, 260 bp, Unknown
  Description of Unknown: RightRegion for integrase B6666 sequence
attgtatttgacaaagagaataaaacattagattttcactattacataaaagaagattagatcattgagatatttttagaaatcatgtatattgtttttccgagatacatatgctataatgccagtaggcaaaatgatagcaatgtttcaagttgaaacaaaaaaagaaaaaacctcagtacggcaatactggggttttttcttgtctataatgggacaagatccacggttaggttgtacgctatttatgcctgtctaac

SEQ ID NO: 32666 - DNA, 109 bp, Unknown; identical to SEQ ID NO: 32655
  Description of Unknown: RightRegion for integrase B6667 sequence

SEQ ID NO: 32667 - DNA, 260 bp, Unknown; identical to SEQ ID NO: 32646
  Description of Unknown: RightRegion for integrase B6668 sequence

SEQ ID NO: 32668 - DNA, 109 bp, Unknown
  Description of Unknown: RightRegion for integrase B6669 sequence
aaggacattgtttttgaccgcaaaaaggggcatttatatattcacttttatgtatcataggttattacaatccggccctccgtactggctcattataaactgggccatc

SEQ ID NO: 32669 - DNA, 260 bp, Unknown
  Description of Unknown: RightRegion for integrase B6670 sequence
attgtatttgacaaagagaataaaacattagattttcactattacataaaagaagattagatcattgagatattttttagaaatcatgtatattgtttttccgagatacatatgctataatgccagtaggcaaaatgatagcaatgtttcaagttgaaacaaaaaagaaaaaaacctcagtacggcaatactggggttttttcttgtctataatgggacaagatccacggttaggttgtacgctatttatgcctgtctaa

SEQ ID NO: 32670 - DNA, 109 bp, Unknown
  Description of Unknown: RightRegion for integrase B6671 sequence
gttgaaaaaatagtgctgcatcgtccttcaaacgaaatcgaaattttttatcattattaattatctcttaaaacaatatgctccaccatattgactaatgataattttt

SEQ ID NO: 32671 - DNA, 109 bp, Unknown
  Description of Unknown: RightRegion for integrase B6672 sequence
attgtattcgataaagaaaacaaaaccttagatttttattattacataaaagaagattagatcattcagatgtttttagaaatcatgtatattgtttttccgagataca

SEQ ID NO: 32672 - DNA, 260 bp, Unknown
  Description of Unknown: RightRegion for integrase B6673 sequence
attgtatttgacaaagagaataaaacattagattttcactattacataaaagaagattagatcatttcagattttttagaaatcatgtatattgtttttccgagatacatatgctataatgccagtaggcaaaatgatagcaatgtttcaagttgaaacaaaaaagaaaaaacctcagtacggcaatactggggttttttcttgtctataatgggacaagatccacggttaggttgtacgctatttatgcctgtctaacc

SEQ ID NO: 32673 - DNA, 260 bp, Unknown
  Description of Unknown: RightRegion for integrase B6674 sequence
ataaaagagatagttgttaataaagaagctgatactattgatattcattacttcagctagttttatcccattaaacaacaaggatgaccataacgtttaatgggtaaaatataaaaaacagggttagtactattgctaaccctttatttatttcacatataaatcggcttcataagcgcaatatcctttactgcacctaataagatttagtgaatggtatctttttagatttagtaggtcttctactgcaaaaccaaatt

SEQ ID NO: 32674 - DNA, 109 bp, Unknown
  Description of Unknown: RightRegion for integrase B6675 sequence
attgtatttgacaaagagaataaaacattagattttcactattacataaaagaagattagatcattgagatattttttagaaatcatgtatattgtttttccgagatac

SEQ ID NO: 32675 - DNA, 260 bp, Unknown
  Description of Unknown: RightRegion for integrase B6676 sequence
attgtattcgataaagaaaacaaaaccttagatttttattattacataaaagaagattagatcattcagatgtttttagaaatcatgtatattgtttttccgagatacatatgctataatgccagtaggcaaaatgatagcaatgtttcaagttgaaacaaaaaagaaaaaacctcagtactgcaatactggggttttttcttgtctataatgggacaagatccacggttaggttgtacgctatttatgcctgtctaacc

SEQ ID NO: 32676 - DNA, 260 bp, Unknown
  Description of Unknown: RightRegion for integrase B6677 sequence
tatgacaacgaaaaagatactcttgatatatactttagattaatagaaaaaagcctgtaaatacaggctttttaatgattataccttacggaagtacggtggtccatacttctgtaaggtatagtgttcaaaaaatcaggttttatcaggctttatagatagtctggttggtttttctatctacaatttcaccttttattttgtcggcatttctaacagcatatttatatgttgtatatgcgccatactgtttacctttt

SEQ ID NO: 32677 - DNA, 260 bp, Unknown; identical to SEQ ID NO: 32648
  Description of Unknown: RightRegion for integrase B6678 sequence

SEQ ID NO: 32678 - DNA, 172 bp, Unknown
  Description of Unknown: RightRegion for integrase B6679 sequence
attgtattcgataaagaaaacaaaaccttagatttctattattatataaaagaagattgagtcatggccccttgattccgcagtattacttggtttgcagagtttatacgcacttgcagaatggatgacgcagtggggttctaaatacttaggcgatcagggatatgctccg

SEQ ID NO: 32679 - DNA, 260 bp, Unknown; identical to SEQ ID NO: 32648
  Description of Unknown: RightRegion for integrase B6680 sequence

SEQ ID NO: 32680 - DNA, 109 bp, Unknown; identical to SEQ ID NO: 32655
  Description of Unknown: RightRegion for integrase B6681 sequence

SEQ ID NO: 32681 - DNA, 260 bp, Unknown
  Description of Unknown: RightRegion for integrase B6682 sequence
attgtattcgacaaagaaaacaaaaccttagatttctattattacgtaaaagaagattaagccatagcccattaattccgcagtattacttggtttgcatagtttatacgcacttgcagaatggatgacgcagtggggttctaaatacttaggtgatcagggatatgctccgattgagatcttgagatattattatggagagagtatgtacatcaataccgcagaacagatttcaggaattccttcttcctggccgggat

SEQ ID NO: 32682 - DNA, 109 bp, Unknown; identical to SEQ ID NO: 32671
  Description of Unknown: RightRegion for integrase B6683 sequence

SEQ ID NO: 32683 - DNA, 109 bp, Unknown
  Description of Unknown: RightRegion for integrase B6684 sequence
attgtatttgacaaagagaataaaacattagattttcactattacataaaagaagattagatcattgagatatttttagaaatcatgtatattgtttttccgagataca

SEQ ID NO: 32684 - DNA, 260 bp, Unknown
  Description of Unknown: RightRegion for integrase B6685 sequence
tatgacaacgaaaaagatactcttgatatatactttagattaatagaaaaaagcctgtaaatacaggctttttaatgattataccttacggaagtacggtggtccggatggtgaggcaggtgcaagcatgcgatatatgtcacagcgttattcaataggtgacaggcaggttgcaggagtccttaccgatatcgctacagaagaattggcgcacctcgagatgattgccacaatgattcaccagcttacaaggaatctta

SEQ ID NO: 32685 - DNA, 260 bp, Unknown
  Description of Unknown: RightRegion for integrase B6686 sequence
attgtatttgacaaagagaataaaacattagattttcactattacataaaagaagattagatcattgagatattttttagaaatcatgtatattgtttttccgagatacatatgctataatgccagtaggcaaaatgatagcaatgtttcaagttgaaacaaaaaaagaaaaaacctcagtacggcaatactggggttttttcttgtctataatgggacaagatccacggttaggttgtacgctatttatgcctgtctaa

SEQ ID NO: 32686 - DNA, 260 bp, Unknown
  Description of Unknown: RightRegion for integrase B6687 sequence
aagatcgtgtacgataaagaacacggaaaactaaaatgctattattatatttcaatttaacccggaaaacccatgatgcgcggctttccgggtacttatctgtttccgcactatggtcctccttattgtaaaaacagataacgcattaaggcctctggctgtatactctgacagtgcgaaaatataattatgagggagagaagggggaaaaatgaaccgaacagatgaattatttttttgagataattgagacctaccag

SEQ ID NO: 32687 - DNA, 260 bp, Unknown; identical to SEQ ID NO: 32612
  Description of Unknown: RightRegion for integrase B6688 sequence

SEQ ID NO: 32688 - DNA, 109 bp, Unknown; identical to SEQ ID NO: 32671
  Description of Unknown: RightRegion for integrase B6689 sequence

SEQ ID NO: 32689 - DNA, 109 bp, Unknown
  Description of Unknown: RightRegion for integrase B6690 sequence
gttgaaaaaatagtgcttcatcgtccttcaaacgaaattgaaattttttatcattattgattatctcttaaaacaatacgcaccaccatattgactaatgataattttt

SEQ ID NO: 32690 - DNA, 260 bp, Unknown; identical to SEQ ID NO: 32646
  Description of Unknown: RightRegion for integrase B6691 sequence

SEQ ID NO: 32691 - DNA, 109 bp, Unknown
  Description of Unknown: RightRegion for integrase B6692 sequence
gtgaccaaaatcacttatgataagaagtcgcaaacccttgatttttcgctgtttctttgagttatagggtattgtagtatcgtccaccatactgactgattatgatctg

SEQ ID NO: 32692 - DNA, 260 bp, Unknown
  Description of Unknown: RightRegion for integrase B6693 sequence
acgggaaaaggggaatatttcaaaacagaaattttagaaacatcttttattgaaaagtaacgtgtgcaatatcggtacagatgtaccgatatccgtaagtgttgcggtcacctctttatatggcatggtataccgctgagataaataccgcattgatgcagcgagctccccgtccggtccaccaaatagcaataacatataatatttttacatattataaatatacacgaaaatgatacaatattcgcccctcagagagc

SEQ ID NO: 32693 - DNA, 260 bp, Unknown
  Description of Unknown: RightRegion for integrase B6694 sequence
cagtttatccgtcgcatcgaggtggcggaggacagcgcggagatcatctgggcggtgtaaaacaaatcgccgccgtccgcgccgatgcagccaatcaactcaaccgataacaaggaggaattgcacctatgaaaatcgaaaacaagacacctatcgcggaggagatcatccgcaacaaccccaccggccacggcctgttcgccggtatcggggacaacttcaacagcgtggcccaggtcatctgtgagctgatggacgac

SEQ ID NO: 32694 - DNA, 260 bp, Unknown
  Description of Unknown: RightRegion for integrase B6695 sequence
atcgactgggataaatctcaaaataccctcacgattcattaccgttttattatcccataattttttgcccgtaatcgtagttaagtggtatatggtggcccttacatcatttaactgtagatttgcctttaccgtcctcacatctcccggtacattgccagcagattcttgatctcctgtgtcttctctatctgcttttcgtggagatagtcgtagacggcagccatggcctcgggcggctctccattggagcgcttgta

SEQ ID NO: 32695 - DNA, 260 bp, Unknown
  Description of Unknown: RightRegion for integrase B6696 sequence
ctgattgaatctatagttatctatgaagatgctattaagatcacttggaagttccagtaattttaaggcttatttattttttgattttttgataaggcaagttattgtttctatatgatacagtatccatatgtcctgaaaacataataggttctttatgaacatcacctttcaataccgcataaatattccctgcttcaaagccttctataggcatttctctacactccatatgacattctttaaaaaccttcatcaaa

SEQ ID NO: 32696 - DNA, 260 bp, Unknown
  Description of Unknown: RightRegion for integrase B6697 sequence
caaacttttgaaaaaattgaagtaaatcaaggtaaaattgtaaaaattatattaaggtagttttctacctttttttattttagtttcacaagggaacatctgcgatactaaaaaataaattatttttccttattatatgtattattgtttatttttttataacttttattatctttttggttgactagtcaaccaagatatagtataatgttagtgtaaaaaataaatagcccaagtggctttaaaaaaggagaaaaaaa

SEQ ID NO: 32697 - DNA, 109 bp, Unknown
  Description of Unknown: RightRegion for integrase B6698 sequence
attgtattcgacaaagaaaacaaaaccttagatttctattattacgtaaaagaagattaagccatagcccattaattccgcagtattacttggtttgcatagtttatac

SEQ ID NO: 32698 - DNA, 260 bp, Unknown
  Description of Unknown: RightRegion for integrase B6699 sequence
aatatcacctggagcaaagccgccaacaccctcaccatccactaccgcctcgtcctttagccatgctcattttatggttaattgatatatggaggcccggacggagagctcggcgcgtcactgcgctacctctcccagcgctactccatgccctaccccgagctcaagggcctgctgaccgatatcggcacagaggaagcgtcatggcccccaattttggcgcggtatttttccagtccgtccagcacatagacccattt

SEQ ID NO: 32699 - DNA, 65 bp, Unknown
  Description of Unknown: RightRegion for integrase B6700 sequence
cccatgttggattcgaaccaacggccttctgctccggaggcagacgctctaatcccctgagctaa

SEQ ID NO: 32700 - DNA, 83 bp, Unknown
  Description of Unknown: RightRegion for integrase B6701 sequence
ccggatgggggttcgtgtaagtcgcaactggcggaggaggagggattcgaaccctcgtgaccttatacaggccaaacggtttt

SEQ ID NO: 32701 - DNA, 260 bp, Unknown
  Description of Unknown: RightRegion for integrase B6702 sequence
aaagagattgtttttgaccgcggcaaagggcatttacatattcatttttatatatcataggttattacagtccggcccaccatactgactcattataaactgagccatctgggcattgggctctttgatattaaccggaaattccaatctcttctcataaatccacattaatagcaccctccttcccatggccacggatcattaatccaggaccaatatgcagcatctgtattagcggaagctgtcaaaggtccaaactg

SEQ ID NO: 32702 - DNA, 260 bp, Unknown
  Description of Unknown: RightRegion for integrase B6703 sequence
ttaatagaatctatattaatctatgacgacgctatcgagataaactggaaattccagtaaatctcgtttatttatttttttatttttgacaggcaacagatagtctccacgtgagtagagggtagctgttgccctatctttctttttaagtaatatcaacgattacaggtttttaaattttccataatatgttatgatagaaaaaattatggagggtttatactatgagaacaaagaaacaaaaaacgaaaaacaaatac

SEQ ID NO: 32703 - DNA, 260 bp, Unknown
  Description of Unknown: RightRegion for integrase B6704 sequence
caaacttttgaaaaaattgaagtaaatcaaggtaaaattgtaaaaattatattaagataaataaatggcaaaaatttctatataaaaaaaggcaaaagtgttgacatattttaaaaaattgcatataatattattgcagatagatattttatgctgtatacttgtggtagcgaattaaagtttaagtgatatgttttatcatcgcccacaaggagccactttgtggctttttttattttaaaataaggagttacaattat

SEQ ID NO: 32704 - DNA, 109 bp, Unknown
  Description of Unknown: RightRegion for integrase B6705 sequence
attgtattcgataaagaaaacaaaaccttagatttctattattacataaaagaagattaagtcataactcctcaattccgcagtattacttggtttacagagtttatac

SEQ ID NO: 32705 - DNA, 260 bp, Unknown
  Description of Unknown: RightRegion for integrase B6706 sequence
aaaaagattgtatttgatcgtgagaataaaaccttggatttttactattatactaaataatttttttgctacttatgtacttacttagaggatgacgcagtggggttctaaatacttaggtgatcagggttatgcaccgattgagattttgagatattattatggagaaagtatgtatatcaataccgccgaacagatttctgggattccatcttcctggccgggatatgatttgacgattgggagcagcggagataaag

SEQ ID NO: 32706 - DNA, 260 bp, Unknown
  Description of Unknown: RightRegion for integrase B6707 sequence
aaagagattgtttttgaccgcggcaaagggcatttacatattcatttttatatatcataggttattgcagtccggcccgccatactgactcattataaactgagccatctgggcattgggctctttgatattaaccggaaattccaatctcttctcataaatccacattaatagcaccctccttcccatggccacggatcattaatccaggaccaatatgcagcatctgtattagcggaagctgtcaaaggtccaaactg

SEQ ID NO: 32707 - DNA, 260 bp, Unknown
  Description of Unknown: RightRegion for integrase B6708 sequence
aaagagattgtttttgaccgcggcaaagggcatttacatatacatttttatatatcataggttattaccgtccggcccaccatactgactcattataaactgagccatctgggcattgggctctttgatattaactggaaattccaatctcttctcataaatccacattaatagcaccctccttcccatggccacggatcgttaatccaggaccagtatgcagcatctgtattagcggaagctgtcaaaggtccaaactg

SEQ ID NO: 32708 - DNA, 260 bp, Unknown; identical to SEQ ID NO: 32703
  Description of Unknown: RightRegion for integrase B6709 sequence

SEQ ID NO: 32709 - DNA, 260 bp, Unknown
  Description of Unknown: RightRegion for integrase B6710 sequence
aataatcgttggaatagcaacattgatgatatgcagttaaaaatatatctgaaaatataattttttacttgaatgtataaaatctttatgctatgatgtaaaatatcaacggtaatcatataactgcatattcatttgtagttcgttgattactgtttattttttcccaaacaaaacacatttgcggttgtttcttccgcttatgcgcatacggctctcggagcgtgcgacatctcctgaaactgtcgggtattggcaag

SEQ ID NO: 32710 - DNA, 260 bp, Unknown
  Description of Unknown: RightRegion for integrase B6711 sequence
gataagataatctttcataaacatgatagcagccttgagctgtttttaattgatcagtaagcctatactctaatgaagtatgggggtgcagatggcgagttgggtgcctccctgcggtatctcagccagaaatttacgatggtaacgcctgaggcaaaggcaacgctgaatgacattgctacagaggaatatgtgtgttacatctatcagttattccattcatacagcagaataagaaaataaaaaccccatccttgatg

SEQ ID NO: 32711 - DNA, 260 bp, Unknown; identical to SEQ ID NO: 32622
  Description of Unknown: RightRegion for integrase B6712 sequence

SEQ ID NO: 32712 - DNA, 260 bp, Unknown
  Description of Unknown: RightRegion for integrase B6713 sequence
gaaaaagtaatctacaataaacacaccaacagcctagagctgtttttaattgacggataaacctataccatgattcaatatgggggtgcttacttcattaagatatatctgcataaaaataacaggatagccttagccgtcctgttatttgtcttttacgaatcccgtcctttttgtcttatgatgcccttgacattcttcatgtaaattattctttccgtctgctcaaaatctgtctagtatcgtatatcaaatcacaa

SEQ ID NO: 32713 - DNA, 260 bp, Unknown
  Description of Unknown: RightRegion for integrase B6714 sequence
aaagagattgtttttgaccgcggcaaagggcatttacatattcatttttatatatcataggttattgcagtccggcccaccatactgactcattataaactgagccatctgggcattgggctctttgatattaactggaaattccaatctcttctcataaatccacattaatagcaccctccttcccatggccacggatcgttaatccaggaccagtatgcagcatctgtattagcggaagctgtcaaaggtccaaactg

SEQ ID NO: 32714 - DNA, 260 bp, Unknown
  Description of Unknown: RightRegion for integrase B6715 sequence
gataagataatctttcataaacacgatagcagccttgagctgtttttaattgatcagtaagcctataccctaatgaagtatgggggtgcagatggcgagttgggtgcctccctgcggtatctcagccagaaatttacgatggtaacgcctgaggcaaaggcaacgctgaatgacattgctacagaggaattcgcccatttggagatgatgggcaccatcgtgcatcagctgacacaggggctaacaaaggacgaaattct

SEQ ID NO: 32715 - DNA, 260 bp, Unknown
  Description of Unknown: RightRegion for integrase B6716 sequence
gataagataatctttcataaacacgatagcagccttgagctgtttttaattgatcagtaagcctataccctaatgaagtatgggggtgcttacttcattaggatatagcaataaaaaaccccagatccgaaggacaccagagtacgttcaatggatcaatgtttgaaacaaaaacaatttaaaatggctgcctttcggcagccttatttatgaggtgtggaggaattgaacccccggcgtttatccttaataactgctac

SEQ ID NO: 32716 - DNA, 260 bp, Unknown
  Description of Unknown: RightRegion for integrase B6717 sequence
aaagagattgtttttgaccgcagtcaagggcatttacatattcatttttatatatcataggttattacagtccggcccaccatactgactcattataaactgagccatctgggcattgggctctttgatattaaccggaaattccaatctcttctcataaatccacattaatagcaccctccttcccatggccacggatcattaatccaggaccaatatgcagcatctgtattagcggaagctgtcaaaggtccaaactg

SEQ ID NO: 32717 - DNA, 260 bp, Unknown
  Description of Unknown: RightRegion for integrase B6718 sequence
aagacttttgaaaaaatagaagtaaatcaaggtaaaattgtaaaaattatattaaggtagttttctacctttttttattttagtttcacaagggaatacttgtgaaccatacataattaaataacctattccatatctagaaacaatgaattcacctacaattaccccaacccaactcataccaatattaatttttataatattaattatattggccatattagcaggaataatgagttttgttaaaatctgccatttac

SEQ ID NO: 32718 - DNA, 260 bp, Unknown
  Description of Unknown: RightRegion for integrase B6719 sequence
gataagataatctttcataaacatgatagcagccttgagctgtttttaattgaccaataaacctataccctaatgaagtatgggggtgcagatggcgagttgggtgcctccctgcggtatctcagccagaaatttacgatggtaacgcctgaggcaaaggcaacgctgaatgacattgctacagaggaattcgcccatttggagatgatgggcaccatcgtgcatcagctgacacaggggctaacaaaggacgaaattct

SEQ ID NO: 32719 - DNA, 260 bp, Unknown
  Description of Unknown: RightRegion for integrase B6720 sequence
aaagagattgtttttgaccgcggcaaagggcatttacatattcatttttatatatcataggttattgcagtccggcccaccggatgtcaataacatatgattaaattaagcccctggaatcatggttccggaggcttttctggttttattatagcatggatggaaggcaatgtcagtatgtttttggaaatctatttgaactaggccctatggatgccggtctgcaccaaaagaatcattccccatttattttcccgcat

SEQ ID NO: 32720 - DNA, 92 bp, Unknown
  Description of Unknown: RightRegion for integrase B6721 sequence
gacggctcttgtaccgttcacattggcgtacataaaattggtgctggtgaccggacttgaaccggtacgatattgctaccgagggattttaa

SEQ ID NO: 32721 - DNA, 260 bp, Unknown
  Description of Unknown: RightRegion for integrase B6722 sequence
gataagataatctttcataaacacgatagcagccttgagctgtttttaattgatcagtaagcctataccctaatgaagtatgggggtgcagatggcgagctgggtgcatccctgcggtatctcagccagaaatttacgatggtaacgcccgaggcaaaagcaacgctgaatgacattgctacagaggaatatgtgtgttgcatctatcaattattccattcatacagcagaataagaaaataaaaaccccatccttgatg

SEQ ID NO: 32722 - DNA, 260 bp, Unknown
  Description of Unknown: RightRegion for integrase B6723 sequence
ctcgtccgatacatagaactgaacgatgataccgtatatattcactggaagtttacatgatgaataaaaacaacaaaaagcagatgtaaaaacacatctgcttttttaatgtaatgtcatcagacaacatttttaatttttcgtgaaatctataaacggcaaatgatatgctgaatatggtgaagctgctgtcaattcaactaccatctgacgtatatatccaagcaacaatgcaggagcattttgatttagcaactgct

SEQ ID NO: 32723 - DNA, 109 bp, Unknown
  Description of Unknown: RightRegion for integrase B6724 sequence
aaaaaaattgtatttgatcgtgagaataaaaccttggatttttactattatactaaataatttttgctacttatgtacttgctgaaaggatgacgcagtggggttctaa

SEQ ID NO: 32724 - DNA, 260 bp, Unknown
  Description of Unknown: RightRegion for integrase B6725 sequence
ttatttatcgtaaaacattgtttcgggtttgttttgatactggaagacgtagacgcttagtctgcgtctttctttttgggttcagtgtaagtaagtgcctgtttggaatcggtcacaccagcggtagtagggtcagtgacgataccgaggatagccagcactgcgaacagagcattgactacctcaagcagtttgttacccaaatcaccgaggtcgagggtgtaaccaaacacggcggctaccacctgtaccagcaacag

SEQ ID NO: 32725 - DNA, 109 bp, Unknown; identical to SEQ ID NO: 32641
  Description of Unknown: RightRegion for integrase B6726 sequence

SEQ ID NO: 32726 - DNA, 109 bp, Unknown; identical to SEQ ID NO: 32641
  Description of Unknown: RightRegion for integrase B6727 sequence

SEQ ID NO: 32727 - DNA, 109 bp, Unknown
  Description of Unknown: RightRegion for integrase B6728 sequence
aaaaagattgtatttgatcgtgagaataaaaccttggatttttactattatactaaataatttttgctacttatgtacttacttagaggatgacgcagtggggttctaa

SEQ ID NO: 32728 - DNA, 109 bp, Unknown
  Description of Unknown: RightRegion for integrase B6729 sequence
aaagagattgtttttgaccgcggcaaagggcatttacatattcatttttatatatcataggttattgcagtccggcccaccatactgactcattataaactgagccatc

SEQ ID NO: 32729 - DNA, 260 bp, Unknown
  Description of Unknown: RightRegion for integrase B6730 sequence
aagacttttgaaaaaatagaagtcagtaatggcaaaattgttaaagttagtttgagataattaaatatggcgaattcgccataattataaatttatgaagatttgccaaaagattttttgcattcgattgcaaaaaaaagaagattaaataatttaatattctcgttgtgttttttaaaaaatagtgtataatataagtgcagataaatattaatgctgtatacctatgataccaaaccaaaagtttaagtgatatgtaa

SEQ ID NO: 32730 - DNA, 109 bp, Unknown
  Description of Unknown: RightRegion for integrase B6731 sequence
aaaaaaattgtatttgatcgtgagaataaaaccttagatttttactattatactaaataattttttgctacttatgcacttaccgagaggatgacgcagtggggttcta

SEQ ID NO: 32731 - DNA, 260 bp, Unknown
  Description of Unknown: RightRegion for integrase B6732 sequence
ctcgtccgatacatagaactgaacgatgataccgtatatattcactggaagtttacatgatgaataagaacgacaaaaagcagatgtgagaaccctcatctgctttttatcatgtaatgtcatcagacaaccgactcatccctgacatttaatccttcaagaaatgacaaatcaagtccatcatcctgaataaagtaagctccttttctctcttctgttctaaaattgtcactgtgtatgaactcttctctgcgttcaat

SEQ ID NO: 32732 - DNA, 109 bp, Unknown
  Description of Unknown: RightRegion for integrase B6733 sequence
aatatcacctggaacaaagccgccaacaccctcaccatccactaccgcctcgtcctttagccatgctcattttatggttaattgatatatggaggcccggacggcgagc

SEQ ID NO: 32733 - DNA, 260 bp, Unknown
  Description of Unknown: RightRegion for integrase B6734 sequence
ttatttatcgtaaaacattgtttcgggtttgttttgatactggaagacgtagacgtttagtctgcgtctttctttttgggttcagtgtaagtaagtgcctgtttggaatcggttacaccagcggtagtagggtcagtgacgataccgaggatagccagcactgcgaacagagcattgactacctcaagcagtttgttacccaaatcaccgaggtcgagggtgtaaccaaacacggcggctaccacctgtaccagcaacag

SEQ ID NO: 32734 - DNA, 260 bp, Unknown
  Description of Unknown: RightRegion for integrase B6735 sequence
ctgattaaagagattgtcgtagacgaagaagatcttcatgtctactggaaatttgcataaaatatacgtggaacccttgctatcactggcttgggttcttttgcgtattaagagaatcttctccaaagtagatgtacttaatatgcaatggcatccgtctctcttattattctaaaagttttatttattcaggtcaataacacgagcaaaaataaaaggccctgtcatagtggcagagcctctttttcttattcgcggga

SEQ ID NO: 32735 - DNA, 260 bp, Unknown
  Description of Unknown: RightRegion for integrase B6736 sequence
gagttcagcaaaaccgcttctacactggatttgctgtacaaattataccaaatggagtaagcacctccatattggcttattatattttttgctagttttggattagggcattttatatttataggatattgtaatactttattataggtccacattaaaaactccccctttcccaaggccatggttcctctaaccatctccatttattacatggaaatgcaattgtaagcggtccatatactttttgatatttatttgat

SEQ ID NO: 32736 - DNA, 260 bp, Unknown
  Description of Unknown: RightRegion for integrase B6737 sequence
gttgacaaagttgtctttgaccgcaaaacatcaagcattgaaatgtattacctgtgctgaaacggcatatttaggcgggtttagagggggtgtaactttttgaagtctggtggccctgacggcgaacttggtgcagcgcttcgctatctcaatcagcgttactcagccccctgtcgtgaagtgcaggcaatactcaacgatatcggcacagaagaacttgcccacatcgaaatgatcggcactattatctatcagctgac

SEQ ID NO: 32737 - DNA, 109 bp, Unknown
  Description of Unknown: RightRegion for integrase B6738 sequence
gttgacaaagttgtctttgaccgcaaaacgtcaagcattgagatgtattacctgtgctgaaacggcgtatttaggcggttttagagtgggtataactttttgaagcttg

SEQ ID NO: 32738 - DNA, 260 bp, Unknown
  Description of Unknown: RightRegion for integrase B6739 sequence
gttgacaaagttgtctttgaccgcaaaacgtcaagcattgaaatgtattacctgtgctgaaacggtgtatttagacggttttagagtgggtataactttttgaagtctggtggccctgacggcgagcttggtgcagcgcttcgctatctcaatcagcgttactcagccccctgccgtgaggtgcaggcaatactcaacgatatcggcacagaagaacttgcccacatcgaaatgatcggcactattatctatcagctgac

SEQ ID NO: 32739 - DNA, 109 bp, Unknown
  Description of Unknown: RightRegion for integrase B6740 sequence
gttgacaaagttgtctttgtccgcaaaacgtcaagcattgaaatgtattacctgtgctgaaacggcgtatttaggcggttttagagtgggtataactttttgaagtctg

SEQ ID NO: 32740 - DNA, 260 bp, Unknown
  Description of Unknown: RightRegion for integrase B6741 sequence
gttgacaaagttgtctttgaccgcaaaacgtcaagcattgaaatgtattacctgtgctgaaacggcgtatttaggcggttttagagtgggtataactttttgaagcttggtggtgcggactttaaaaagttatatataaaaaacgagaagtagtacaaactgcttctcgtttttttgctctagccttttcacatcgaaatacaataatcacattaagcaattatgcaatattaacaattatttcttgttagaaagataca

SEQ ID NO: 32741 - DNA, 109 bp, Unknown; identical to SEQ ID NO: 32739
  Description of Unknown: RightRegion for integrase B6742 sequence

SEQ ID NO: 32742 - DNA, 260 bp, Unknown
  Description of Unknown: RightRegion for integrase B6743 sequence
gttgacaaagttgtctttgaccgcaaaacgtcaagcattgagatgtattacctgtgctgaaatggcgtatttaggcggttttagaggggatataactttttgaagtctggtggccctgacggcgagcttggtgcagcgcttcgctatctcaatcagcgttactcagccccctgccgtgaggtgcaggcaatactcaacgatatcggcacagaagaacttgcccacatcgaaatgatcggcactattatctatcagctgac

SEQ ID NO: 32743 - DNA, 260 bp, Unknown
  Description of Unknown: RightRegion for integrase B6744 sequence
gttgacaaagttgtctttgaccgcaagacgtcaagcattgaaatgtattacctgtgctgaaatggcgtatttaggcggttttagagcgggtataactttttgaagtctggtggccctgacggcgagcttggtgcagcgcttcgctatctcaatcagcgttactcagccccctgccgtgaggtgcaggcaatactcaacgatatcggcacagaagaacttgcccacatcgaaatgatcggcactattatctatcagctgac

SEQ ID NO: 32744 - DNA, 260 bp, Unknown
  Description of Unknown: RightRegion for integrase B6745 sequence
gccacataccgcaaggcggacaattcgctgtccgtcatttatatgatggtcgttttataacttattgcagtttagaccgccgtactcctttaagttatgcaaaatatccccggagccgaagccccggggaaaactttatttaacctgcacaacgaacccgtcgaaaccggctttcttcagcttctgcatgtaagcttccgcatttgtgcgggaactgaacgcacctacctgcacgcgataaagttcactggatttctgca

SEQ ID NO: 32745 - DNA, 260 bp, Unknown
  Description of Unknown: RightRegion for integrase B6746 sequence
aaaaagattgtgttcgatcgtgaaaataaaacattagatttttactactatactcgataattttttgctttgtcgcacttgcagagcggatgacgcagtggggttctaaatacttaggcgatcagggatatgctccgattgagatcctgagatattattatggagagagtatgtacatcaataccgcagaacagatttcaggaatcccttcttcctggccgggatatgatctgacgatcggcagcagaggagataaggtt

SEQ ID NO: 32746 - DNA, 109 bp, Unknown
  Description of Unknown: RightRegion for integrase B6747 sequence
gttgacaaagttgtctttgaccgcaagacgtcaagtattgaaatgtattatctgtgttgaaacggcgtatttaggcggttttagagtgggtataactttttgaagtctg

SEQ ID NO: 32747 - DNA, 260 bp, Unknown
  Description of Unknown: RightRegion for integrase B6748 sequence
gttgacaaagttgtctttgaccgcaaaacgtcaagcattgagatgtattacctgtgctgaagcggcgtatttaggcggttttagagtgggtataactttttgaagtctggtggccctgacggcgagcttggtgcagcgcttcgttatctcaatcagcgttactcagccccatgtcgtgaggtgcaggcaatactcaacgatatcggcacagaagaacttgcccacatcgaaatgatcggcactattatctatcagctgac

SEQ ID NO: 32748 - DNA, 109 bp, Unknown
  Description of Unknown: RightRegion for integrase B6749 sequence
aaaaagattgtgttcgatcgtgaaaataaaacattagatttttactactatactcgataattttttgctttgtcgcacttgcagagcggatgacgcagtggggttctaa

SEQ ID NO: 32749 - DNA, 141 bp, Unknown
  Description of Unknown: RightRegion for integrase B6750 sequence
aaaaagattgtgttcgatcgtgaaaataaaacattagatttttactactatactcgataattttttgctttgtcgcacttgcagagcggatgacacagtggggttctaaatacttaggtgatcagggatatgctccgattg

SEQ ID NO: 32750 - DNA, 260 bp, Unknown
  Description of Unknown: RightRegion for integrase B6751 sequence
atcacatgggacaaggcgcagaacctcctgaccatccactaccggctcatgctggaataaattttgcccctaatcgtagtctgttaccatccggtggccctgacatcaacagactatgaaatgggcgcgttttcctaagttgaaatttcacaaaaggggtttacaaatacatttttgcgtaatatactataactaccgagagcgaaagctcccggtcagatagaattgacgtccgtcaatcaccatctgccctaaagagg

SEQ ID NO: 32751 - DNA, 109 bp, Unknown; identical to SEQ ID NO: 32746
  Description of Unknown: RightRegion for integrase B6752 sequence

SEQ ID NO: 32752 - DNA, 109 bp, Unknown
  Description of Unknown: RightRegion for integrase B6753 sequence
gttgacaaagttgtctttgaccgcaaaacatcaagcattgaaatgtattacctgtgctgaaacggcatatttaggcgggtttagagggggtgtaactttttgaagtctg

SEQ ID NO: 32753 - DNA, 260 bp, Unknown
  Description of Unknown: RightRegion for integrase B6754 sequence
tcaaaagttgatgttaccgctgataatatagatatcatatttaaattccaactcgcttaattgcgagtttttatttcgtttatctctatcaaagtaaaagcttttagctctttctgacggcattttttttcacaaattttaacgaataaaaatattttttgtattttctttaaaataaacttctttgttctttccattttttcatcctttctatattcccgaacccatatttgaatagatggggagtaacatggctgcat

SEQ ID NO: 32754 - DNA, 242 bp, Unknown
  Description of Unknown: RightRegion for integrase B6755 sequence
atcgactgggacaaggcccaaaaccagctgaccatccattaccgcctcctgcttgactgacctatttttttgccctccatcgtagtttaatgaagtaaggcccgccgtattgtgaaatgatcagcgcagccagacgcggattggtgttcttgatcttcaccggatattgcagcttcttttcatagacaaacatcagtcgttccctcctttatcccagggccatggatcatccaaccagcgga

SEQ ID NO: 32755 - DNA, 109 bp, Unknown
  Description of Unknown: RightRegion for integrase B6756 sequence
tggcaagcaaagacttcaacatcgagcgtgagcgcatcacaaaagccctcagcgaggtagactcccgcatcaacgagctggacattgccaatgccttcgacctgtcgct

SEQ ID NO: 32756 - DNA, 260 bp, Unknown
  Description of Unknown: RightRegion for integrase B6757 sequence
gagttcagcaaaaccgcttctacactggatttgcagtacaaattataccaaatggagtaagcacctccatattggcttattatattttttgctagttttggattagggcattttatatttataggatattgtaatactttattataggtccacattaaaaactccccctttcccaaggccatggttcctctaaccatctccatttattacatggaaatgcaattgtaagcggtccatatactttttgatatttatttgat

SEQ ID NO: 32757 - DNA, 260 bp, Unknown
  Description of Unknown: RightRegion for integrase B6758 sequence
atcacatgggacaaggcgcagaacctcctgaccatccactaccggctcatgctggaataaattttgcccataatcgtagtctgttaccatccggtggccctgacgtcaacagactacgaagcaagagcgtatatcactccaatctcgcttcatagcatttgacaaatcccgatgcctcgtctattctaatgccataaaggaggtatcgctatggattttgtcgatgtcgaatataccgaggtgcaggacgagcccatcac

SEQ ID NO: 32758 - DNA, 109 bp, Unknown
  Description of Unknown: RightRegion for integrase B6759 sequence
atcacatgggacaaggcgcagaacctcctgaccatccactaccggctcatgctggaataatttttgcccataatcgtagtctgttgccatccggtggcccggacggcga

SEQ ID NO: 32759 - DNA, 109 bp, Unknown
  Description of Unknown: RightRegion for integrase B6760 sequence
gttgacaaagttgtctttgaccgcaagacgtcaagtatcgaaatgtattatctgtgttgaaacggcgtatttaggcggttttagagtgggtataactttttgaagtctg

SEQ ID NO: 32760 - DNA, 260 bp, Unknown
  Description of Unknown: RightRegion for integrase B6761 sequence
gttgacaaagttgtctttgaccgcaaaacgtcaagcattgagatgtattacctgtgctgaaacggcatatttaggcgggtttagagggggtgtaactttttgaagtctggtggccctgacggcgaacttggtgcagcgcttcgctatctcaatcagcgttactcagccccctgtcgtgaagtgcaggcaatactcaacgatatcggcacagaagagcttgcccacatcgaaatgatcggcactattatctatcagctgac

SEQ ID NO: 32761 - DNA, 260 bp, Unknown
  Description of Unknown: RightRegion for integrase B6762 sequence
gcgtataatttcagcaacgccccccgcccaactttgtcaagactcttcagtaatttttgaagaatacgtttgttagctcacaaatgatgtgagacgctttaggagcttcgggcatctgacttcgcccgtagtatccatcagggccctgagcaattcaagcttggcttggttcggggaccttagcttaagcgtcatcctgggcatttcgttgtatctcctcgcccatctcgcgccctgctccctcaggtccttgagggaat

SEQ ID NO: 32762 - DNA, 109 bp, Unknown
  Description of Unknown: RightRegion for integrase B6763 sequence
cttatcgagagaatcgaaataaaggacggtagccaggtatcaatagtttggctcgcttaatttcaacatctctcacagttatttaggcaaaccgacgattccagctttt

SEQ ID NO: 32763 - DNA, 109 bp, Unknown
  Description of Unknown: RightRegion for integrase B6764 sequence
aaaaagattgtgttcgatcgtgaaaataaaacattagatttttactactatactcgataattttttgctttgtcgcacttgcagagcggatgacacagtggggctctaa

SEQ ID NO: 32764 - DNA, 260 bp, Unknown
  Description of Unknown: RightRegion for integrase B6765 sequence
atcacatgggacaaggcgcagaacctcctgaccatccactaccggctcatgctggaataatttttgcccctaatcgtagtctgttaccatccggtggcccggacggcgaattgggcgcttctctgcgctatctcagccagcggtactctatgccctacgctgagttgaagggcctgcttaccgacatcggtagagaagcctctgaaatgttccattcagaggctacggctttttttgatgcttttgcaaccgtatagctc

SEQ ID NO: 32765 - DNA, 109 bp, Unknown
  Description of Unknown: RightRegion for integrase B6766 sequence
aagtacattgtatataacagagcagatagcactctccaattctactattatctatcttaattaattccacccctacaaaaaacattataggtttcagcaattaggccct

SEQ ID NO: 32766 - DNA, 260 bp, Unknown
  Description of Unknown: RightRegion for integrase B6767 sequence
gccacataccgtaaggcggacaattcgctgtccgtcatttatatggtggttgttttataacttattgcagttaagtccgccgtactcctttaagttataaattcgcaaattctaactgcaaataactgcattcctaccccggacaccttgcaatccggcgcaaaatacgctataatataattgaggggaagcccagatctcacccctacctttgcgtaggacattgtgtttcctactaaccatataagctgcgccgtcct

SEQ ID NO: 32767 - DNA, 260 bp, Unknown
  Description of Unknown: RightRegion for integrase B6768 sequence
gctgtttatgacaatgaaaaagacactcttgatatatactttagattaatagaaaaatagggaatatcatcttatatagatgtcattccctatattctatgatagctacctctgatagcctatatgcctgtgaatctgttaatcttaattttgtttcactactatgtatttctgaatgatacttgcttctttctgaaggcaaatatgaaactactgctgaaacatccctgcactgccctacagttacagaaacaacattt

SEQ ID NO: 32768 - DNA, 260 bp, Unknown
  Description of Unknown: RightRegion for integrase B6769 sequence
gagttcagtaaaaccgcttctacactggatttgcagtacaaattataccaaatggagtaagcacctccatattggcttattatattttttgctagttttggattagggcattttatatttataggatattgtaatactttattataggtccacattaaaaactccccctttcccaaggccatggttcctctaaccatctccatttattacatggaaatgcaattgtaagcggtccatatactttttgatatttatttgat

SEQ ID NO: 32769 - DNA, 260 bp, Unknown
  Description of Unknown: RightRegion for integrase B6770 sequence
cgcttgtgtataggttgggggacgcctgatggcgtcccctttccgttttcgttgctgtgaaacgccgtattttgcgttttaaggcgttttaagcctgttggggtactcgtgtacccctcgggcttttttcgtgccttaaaacgcctctgaagcggtctgtggacattcgagcgcccatgcgcatctcgcatccgctcgatgcaagaaagcaacgactgcggcaagaggtacacgtgagggctgaccacatgaccggatga

SEQ ID NO: 32770 - DNA, 109 bp, Unknown
  Description of Unknown: RightRegion for integrase B6771 sequence
gttgacaaagttatctttgaccgcaaaacgtcaagtattgaaatgtattatctgtgttgaaacggcgtatttaggcggttttagagtgggtataactttttgaagtctg

SEQ ID NO: 32771 - DNA, 260 bp, Unknown
  Description of Unknown: RightRegion for integrase B6772 sequence
gttgacaaagttgtctttgaccgcaaaacgtcaagcattgagatgtattacctgtgctgaaatggcgtatttaggcggttttagagtgggtataactttttgaagtctggtggccccgacggcgagcttggtgcagcgcttcgctatctcaatcagcgttactcagccccctgtcgtgaagtgcaggcaatactcaacgatatcggcacagaagaacttgcccacatcgaaatgatcggcactattatctatcagctgac

SEQ ID NO: 32772 - DNA, 112 bp, Unknown
  Description of Unknown: RightRegion for integrase B6773 sequence
gttgacaaagttgtctttgaccgcaagacgtcaagcattgagatgtattatctgtgctgaaacggcgtatttaggcggttttagagtgggtataactttttgaagcttggtg

SEQ ID NO: 32773 - DNA, 260 bp, Unknown; identical to SEQ ID NO: 32734
  Description of Unknown: RightRegion for integrase B6774 sequence

SEQ ID NO: 32774 - DNA, 260 bp, Unknown
  Description of Unknown: RightRegion for integrase B6775 sequence
atcgactgggacaaggcccaaaaccagctgaccatccattaccgcctcctgcttgactgacctatttttttgccctccatcgtagtttaatgaagtaaggcccgccatacaccattagactatgattcaaatgttttgtttgacatttcgccgaaaaaggtctactcttgaaccacaatgcagaaaagagggatcgtcgtggaagttattgatgtcgattacgttgaagtgcccaatgaccccatcgaggagcaacctcc

SEQ ID NO: 32775 - DNA, 109 bp, Unknown
  Description of Unknown: RightRegion for integrase B6776 sequence
aaaatcgtgtatgataaaaaaggtggggtattgttgatgtttttttacattaacggctaacgccaaattgcccgcaagccctttatttatcggcgtttcagggcatcgt

SEQ ID NO: 32776 - DNA, 109 bp, Unknown
  Description of Unknown: RightRegion for integrase B6777 sequence
aaaattgtatatgataaaaaaggtggggcattgttgatgtatttttatattaacgactaacaccaaattgcccgcaattcctttatttatcggtgttccagggcatcgt

SEQ ID NO: 32777 - DNA, 260 bp, Unknown
  Description of Unknown: RightRegion for integrase B6778 sequence
ctgatcgataagatcgttgtcctgaatgaagatattgagattcactggacgttctgttaaaaagagcccggagaatgtccgagctctttcgtttattgaagttctagtaaacagattgtttctatatggaccgtgtttggaaactgatcgactgccgttgctttaattaccttgtatcctgcatctgcaagaatttcaaggtctcgtgcgagactggttggcttgcagctgatataaagcattctttcacacctatatga

SEQ ID NO: 32778 - DNA, 109 bp, Unknown
  Description of Unknown: RightRegion for integrase B6779 sequence
ctgatcgacaagattgttgttttgaatgaagatattgagattcactggacgttctgttaaaaagagcccggagaatgtccgagctcttttgcttattgaagttctagta

SEQ ID NO: 32779 - DNA, 260 bp, Unknown; identical to SEQ ID NO: 32777
  Description of Unknown: RightRegion for integrase B6780 sequence

SEQ ID NO: 32780 - DNA, 260 bp, Unknown
  Description of Unknown: RightRegion for integrase B6781 sequence
gagcaatggaacatagaaaaactgaataaatcagaatcggaacatagaaaaggagcatagagaaagtgacttatttggtggacactgaccgtatgcatactcacaccgctaaaaaatccgattggaatgggagtttttgggtatatggtgggttattctgtgtacggttatatgatttatattgaagcattttttactacataaatgattatcgttttgtctaaaacaccgcatagatataggaattatcataaacagaa

SEQ ID NO: 32781 - DNA, 260 bp, Unknown
  Description of Unknown: RightRegion for integrase B6782 sequence
ctgatcgacaagatcgttgttctgaatgaagatattgaaattcactggacgttctgctaaaaagagcccggagaatgtccgagctcttttgcttattgaagttctagtaaacagattgtttctatatggaccgtgtttgggaactgatcgaccgctgttgctttaattaccttgtatcctgcatctgcaagaatttcgaggtctcgtgcgagactggttggcttgcagctgatataaagcattctttcacacctatatga

SEQ ID NO: 32782 - DNA, 109 bp, Unknown
  Description of Unknown: RightRegion for integrase B6783 sequence
ctgatcgacaagatcgttgttctgaatgaagatattgaaattcactggacgttctgctaaaaagagcccggagaatgtccgagctcttttgcttattgaagttctagta

SEQ ID NO: 32783 - DNA, 260 bp, Unknown
  Description of Unknown: RightRegion for integrase B6784 sequence
accgctgctctgcgggagagttcgtgcagtattgcgtgtgccaaagaacgcttattttgatacaatgcaccctttaaaaggctatcgttttcctgtgagtagctaacgttttcttgtatgcacccgaaaggctatcattttcttttcacatttttgcattaatcggattcaaggacggcacaaggatgatgatggaaatatttgatgaatgaaataacggctgtggtcaaataaccgcagccgttatttggcttcaaaag

SEQ ID NO: 32784 - DNA, 260 bp, Unknown
  Description of Unknown: RightRegion for integrase B6785 sequence
ctgatcgataagatcgttgtcctgaatgaagatattgagattcactggacgttctgttaaaaagagcccggagaatgtccgagctcttttgcttattgaagttctagtaaacagattgtttctatatggaccgtgtttgggaactgatcgaccgctgttgctttaattaccttgtatcctgcatctgcaagaatttcgaggtctcgtgcgagactggttggcttgcagctgatataaagcattctttcacacctatatga

SEQ ID NO: 32785 - DNA, 109 bp, Unknown
  Description of Unknown: RightRegion for integrase B6786 sequence
aaaattgtatatgataaaaaaggtggggcattgttgatgtttttttacattaacggctaacaccaaattgcccgcaaaccctttatttatcggcgtttcagggcatcat

SEQ ID NO: 32786 - DNA, 260 bp, Unknown
  Description of Unknown: RightRegion for integrase B6787 sequence
aaaattgtatatgataaaaaaggtggggcattgttgatgtatttttatattaacgactaacaccaaattgcccgcaatccctttatttatcggtgtttcagggcatcgttatacgttatagcagtatggcggaggatattgcaataacgtatgacggtttttatatagaagaaagtggtgattttttatagaaatttagggaaataatcttagattttaaaaggcttataaaaaaattcgggagcacccacaacaaagtt

SEQ ID NO: 32787 - DNA, 260 bp, Unknown
  Description of Unknown: RightRegion for integrase B6788 sequence
cgtagtaaccgttggcacaaggtggattcgctcgaattaaagatttttcttaaattgtaaaatttgctattgaaaaaagaaagggggtgtgttatcttataaacagtaatcatacaaatgcagtttcatttgcagttcaatgattactgtttatttttttatccattaaacacgcaaaagtgcatttcccccgtgcttttgcgtcatatcccttttacgaccgagcggcaagtcgttaaactgcgggtgtggacgagcca

SEQ ID NO: 32788 - DNA, 109 bp, Unknown
  Description of Unknown: RightRegion for integrase B6789 sequence
gacagaaaaagcaataccctgacattttacctgtattgttccgattcccgcgagggctgatttgttatatgtacttacactatggtccaccatattgtgagagaatgat

SEQ ID NO: 32789 - DNA, 260 bp, Unknown
  Description of Unknown: RightRegion for integrase B6790 sequence
atttcggatatcgttgttgaccaggcgcaaaaggaaatccacttccactactatgcataagacatgccgcaagcccttattttatgcgggtttgtggcatcattataggtttctgccatacggtccaccatactggctcataatgaactgcgccatcttcgcattcggttcctttatatttaccggaaactgcaatcttttttcgtagacccacatcttagcatcctccttcccatggccatttttcagttacccagtcc

SEQ ID NO: 32790 - DNA, 260 bp, Unknown
  Description of Unknown: RightRegion for integrase B6791 sequence
atttcggatatcgttgttgatcaggcacagaaggaaattcatttccactattacgcataagcgccgcaaacccagataaaataggggtttgcggtattattataggttgctgccatacggtccaccatactggctcatgataaactgtgccatcttcgcattcggctccttaatattcaccggaaactgcagtcttttttcatagacccacatcttaacatcctccttcccacggccatttttcagttacccagttccag

SEQ ID NO: 32791 - DNA, 109 bp, Unknown
  Description of Unknown: RightRegion for integrase B6792 sequence
aaaattgtatatgataaaaaaggtggggcattgttgatgtatttttatattaacgactaacaccaaattgcccgcaatccctttatttatcggtgtttcagggcatcgt

SEQ ID NO: 32792 - DNA, 260 bp, Unknown
  Description of Unknown: RightRegion for integrase B6793 sequence
ctttccgaaattgtggtagaccgtcaaaaccgggaaatccacttccactactatgcataaaacatgccgcaatcccttattttatgcgggtttgcggcatcattctatgtttctgcactacggtccaccatactgactcataataaactgcgccatcttcgcattcggttcctttatatttaccggaaactgcaatcttttttcgtagacccacatcttagcatcctccttcccatggccatttttcagttacccagttc

SEQ ID NO: 32793 - DNA, 260 bp, Unknown
  Description of Unknown: RightRegion for integrase B6794 sequence
ttgatcgacaagattgtcgtcttgaacgaaaacgttgaaattcactggactttctgttagtataaaacccgcaaagccctatgctctgcgggttttcctatgtcacctatttgagacgcttatcaatatagtcgcagttagtggctagttcaaagttgccctgcccacgttgttcacccaaggaatcacaggtcagccgcgtccccttagccgaaacctatatctgtattttatttactcattttcattcttgccgcaaa

SEQ ID NO: 32794 - DNA, 109 bp, Unknown; identical to SEQ ID NO: 32791
  Description of Unknown: RightRegion for integrase B6795 sequence

SEQ ID NO: 32795 - DNA, 260 bp, Unknown
  Description of Unknown: RightRegion for integrase B6796 sequence
atattatggtatccagagcctggttctcgcaaaaatggagttataaaaattaaattttaaaatgatggtatttaagtatagtagtattatctgatttacttaaataccatcttttaagtttactaataatctatagaaatccttctctatttcacaaaggttattgcttttactttttttttcaccattttgtttacatttttcgtctttgctcatacctcattccaccctcttaagtttatgaataaattataccaaac

SEQ ID NO: 32796 - DNA, 165 bp, Unknown
  Description of Unknown: RightRegion for integrase B6797 sequence
gaatccataacctactacaaggaagatgagaaattagagtttgtattttatatctcttagcaaaaaagcccggaaatacgggcttttttgcgtatcatctgttactgtcatccggtccaccgaactgcagtaacatagaatacaatccattataataggaagaaa

SEQ ID NO: 32797 - DNA, 260 bp, Unknown
  Description of Unknown: RightRegion for integrase B6798 sequence
atttcggatatcgttgttgatcagacacagaaggaaattcatttccactattacgcataagcgccgcaaacccttattttatctgggtttgcggtattattataggtttctgcccttcggtccaccatactgactcataataaactgcgccatcttcgcattcggttcctttatatttaccggaaactgcaatcttttttcgtagacccacatcttagcatcctccttcccatggccatttttcagttacccagttccag

SEQ ID NO: 32798 - DNA, 260 bp, Unknown
  Description of Unknown: RightRegion for integrase B6799 sequence
aaaattgtatatgataaaaaaggtggggcattgttgatgtatttttatattaacgactaacaccaaattgcccgcaatccctttatttatcggtgtttcagggcatcgttatacgttatagcagtatggcggaggatattgcaataacgtatgacggtatttatatagaagaaagtggtgattttttatagaaatttagggaaataatcttagattttaaaaggcttataaaaaaattcgggagcacccacaacaaagtt

SEQ ID NO: 32799 - DNA, 109 bp, Unknown
  Description of Unknown: RightRegion for integrase B6800 sequence
aaaatcgtgtatgataaaaaaggtggggtattgttgatgtttttttacattaacggctaacaccaaattgcccgcaaaccctttatttatcggcgtttcagggcatcgt

SEQ ID NO: 32800 - DNA, 109 bp, Unknown
  Description of Unknown: RightRegion for integrase B6801 sequence
aaaatcgtgtatgataaaaaaggtggggcattattgatgtttttttacattaacgactaacgccaaattgcccgcaatccctttatttatcggtgtttcagggcatcgt

SEQ ID NO: 32801 - DNA, 109 bp, Unknown; identical to SEQ ID NO: 32791
  Description of Unknown: RightRegion for integrase B6802 sequence

SEQ ID NO: 32802 - DNA, 260 bp, Unknown
  Description of Unknown: RightRegion for integrase B6803 sequence
atttcggatatcgttgttgatcagacacagaaggaaattcatttccactattacgcataagcgccgcaaacccttattttatctgggtttgcggtattattataggtttctgcccttcggtccaccatactggctcataatgaactgcgccatcttcgcattcggttcctttatatttaccggaaactgcaatcttttttcgtagacccacatcttagcatcctccttcccatggccatttttcagttacccagttccag

SEQ ID NO: 32803 - DNA, 260 bp, Unknown
  Description of Unknown: RightRegion for integrase B6804 sequence
atttcggatatcgttgttgatcagacgaagaaggagattcatttccactattacgcataagcgccgcaaacccttattttatctgggtttgcggcattattataggtttctgccatacggcccaccatacgggctcatgataaactgtgccatcttcgcattcggctccttaatattcaccggaaactgcagtcttttttcatagacccacatcttaacatcctccttcccacggccatttttcagttacccagttccag

SEQ ID NO: 32804 - DNA, 109 bp, Unknown
  Description of Unknown: RightRegion for integrase B6805 sequence
aaaatcgtgtatgataaaaaaggtggggtattgttgatgtttttttacattaacggctaacaccaaattgcccgcaaaccctttatttatcggcgtttcagggcatcat

SEQ ID NO: 32805 - DNA, 260 bp, Unknown; identical to SEQ ID NO: 32784
  Description of Unknown: RightRegion for integrase B6806 sequence

SEQ ID NO: 32806 - DNA, 260 bp, Unknown
  Description of Unknown: RightRegion for integrase B6807 sequence
atttcggatatcgttgttgatcagacgaagaaggaaattcatttccactattacgcataataccgcaaacccttattttatctgggtttgcggtattattataggtttctgccatacggcccaccatactgactcataataaactgcgccatcttcgcattcggttcctttatatttaccggaaactgcaatcttttttcgtagacccacatcttagcatcctccttcccatggccatttttcagttacccagttccagg

SEQ ID NO: 32807 - DNA, 109 bp, Unknown
  Description of Unknown: RightRegion for integrase B6808 sequence
aaaattgtatatgataaaaaaggtggggcattgttgatgtatttttatattaacgactaacaccaaattgcccgcaatccctttatttatcggtgttccagggcatcgt

SEQ ID NO: 32808 - DNA, 109 bp, Unknown
  Description of Unknown: RightRegion for integrase B6809 sequence
aaaattgtatatgataaaaaatgtggggcattgttgatgtatttttatattaacgactaacaccaaattgcccgcaatccctttatttatcggtgttccagggcatcgt

SEQ ID NO: 32809 - DNA, 109 bp, Unknown
  Description of Unknown: RightRegion for integrase B6810 sequence
accgctgctctgcgggagagttcgtgcagtgttgcgtgtggtggaggcgacgagaattgaactcgtgtccgaaaacaaatccacacaactttctacgagcgtagtttat

SEQ ID NO: 32810 - DNA, 260 bp, Unknown
  Description of Unknown: RightRegion for integrase B6811 sequence
gaatccataacctactacaaggaagatgagaaattagagtttgtattttatatctcttagcaaaaaaagcccggaaatacgggcttttttcgtatcatctgttactgtcatccggtccaccgaactgactgatgattacctgggccatcttcggattggtctgggtaatttttacgggatattgtaaacgtttttcataattccacataaactaacaccctccttcctgccatggccatggttcctgaatccagttccat

SEQ ID NO: 32811 - DNA, 260 bp, Unknown
  Description of Unknown: RightRegion for integrase B6812 sequence
aaaattgtatatgataaaaaaggtggggcattgttgatgtatttttatattaacggctaacaccaaattgcccgcaaaccctttatttatcggcgtttcagggcatcattatacgttattgcagtacggtggtcctgacggcgaagcaggcgctgcaatgcgttatatgtcacaaaaatatgctatgtctaatcctaaagttgcaggacttttaaacgatatcgcaactgaagaacttggacatttagaaatagttggaa

SEQ ID NO: 32812 - DNA, 260 bp, Unknown
  Description of Unknown: RightRegion for integrase B6813 sequence
acctgcactttcgataagcaaaacatgctcctttccatcgtataccgctatgaaatctgactctttatctccatacctaaaattgtagtctattgatatccggtgggccagaccccagcagcctacaattccaccgcaaatgaaaacgcgcagcgaacttaaccgctgcgcgtttcccatattttcgtgtcatatctcattcacggcgcatgtaccgatccgttcggagcgctgctacaatcgaagaatttcgctttccc

SEQ ID NO: 32813 - DNA, 260 bp, Unknown
  Description of Unknown: RightRegion for integrase B6814 sequence
atttcagatatcgttgttgatcagacacagaaggaaattcatttccactattacgcataagcgccgcaaacccttattttatctgggtttgcggcattatcataggtttctaccataaggtccaccatactgactcataataaactgcgccatcttcgcattcggttcctttatatttaccggaaactgcaatcttttttcgtagacccacatcttagcatcctccttcccatggccatttttcagttacccagttccag

SEQ ID NO: 32814 - DNA, 109 bp, Unknown
  Description of Unknown: RightRegion for integrase B6815 sequence
aaaattgtatatgataaaaaaggtggggcattgttgatgtatttttatattaacgactaacaccaaattgcccgcaaaccctttatttatcggcgtttcagggcatcat

SEQ ID NO: 32815 - DNA, 109 bp, Unknown
  Description of Unknown: RightRegion for integrase B6816 sequence
aaaattgtatatgataaaaaaggtggggcattgttgatgtatttttatattaacggctaacaccaaattgcccgcaaaccctttatttatcggcgtttcagggcatcat

SEQ ID NO: 32816 - DNA, 109 bp, Unknown; identical to SEQ ID NO: 32776
  Description of Unknown: RightRegion for integrase B6817 sequence

SEQ ID NO: 32817 - DNA, 260 bp, Unknown
  Description of Unknown: RightRegion for integrase B6818 sequence
aaaattgtatatgataaaaaaggtggggcattgttgatgtatttttatattaacgactaacaccaaattgcccgcaatccctttatttatcggtgtttcagggcatcgttatacgttatagcagtatggcggagggtattgcaataacgtatgatgtttttttaagttaaaattggtgatgtttttggggattttttagaagtttttcttagatgttttaggattataaaaaattcgggagcacccacaacaaagttgtt

SEQ ID NO: 32818 - DNA, 109 bp, Unknown
  Description of Unknown: RightRegion for integrase B6819 sequence
aaaattgtatatgataaaaaaggtggggcattgttgatgtatttttatattaacgactaacaccaaattgcccgcaaaccctttatttatcggtgtttcagggcatcat

SEQ ID NO: 32819 - DNA, 109 bp, Unknown
  Description of Unknown: RightRegion for integrase B6820 sequence
aaaatcgtgtatgataaaaaaggtggggtattgttgatgtttttttacattaacggctaacaccaaattgcccgcaaaccctttatttatcggtgtttcagggcatcat

SEQ ID NO: 32820 - DNA, 260 bp, Unknown
  Description of Unknown: RightRegion for integrase B6821 sequence
attcaaaagattctcgtaaatgaagaggaaaactcttttgaaatcatatggaacttttaagccggtaaagctagtctttatcggcttttgttctgacaagttttgcaatcgcctcaacgtgagaggtttgagggaacatatctactggttgaacctttaccacctcatagcctaaagggcggaggatagctatatctcgggccatagaggccggattacaggacacataaaccatacgctttggcttcatgcccgccgct

SEQ ID NO: 32821 - DNA, 260 bp, Unknown
  Description of Unknown: RightRegion for integrase B6822 sequence
atttcggatattgttgttgaccaggcgcaaaaagaaattcatttccactattacgcataagcgccgcaaacccagataaaataagggtttgtggcattattataggtttctgcactacggtccaccatactgactcataataaactgcgccatcttcgcattcggttcctttatatttaccggaaactgcaatcttttttcgtagacccacatcttagcatcctccttcccatggccatttttcagttacccagttccag

SEQ ID NO: 32822 - DNA, 260 bp, Unknown
  Description of Unknown: RightRegion for integrase B6823 sequence
attcagaaaatcatcgtaaacgaagaggataactcttttgaaatcatatggaacttttaagccggtaaagctagtctttatcggcttttgttctgacaagttttgcaatcgcctccacgtgagaggtttgagggaacatatctactggttgaacctttaccacctcatagcctaaaggacggaggatagctatatctcgggccatagaggccggattacaggacacataaaccatacgctttggcttcatgcccgccgct

SEQ ID NO: 32823 - DNA, 260 bp, Unknown
  Description of Unknown: RightRegion for integrase B6824 sequence
ctttccgaaattgtggtagaccgtcaaaaccgggaaatccacttccactactatgcataaaacatgccgcaatcccttattttatgcgggtttgcggcatcattctaggtttctgcactacggtccaccgtactggctcatgataaactgtgccatcttcgcattcggctccttaatattcaccggaaactgcagtcttttttcatagacccacatcttaacatcctccttcccacggccatttttcagttacccagttc

SEQ ID NO: 32824 - DNA, 260 bp, Unknown
  Description of Unknown: RightRegion for integrase B6825 sequence
aaaatcgtgtatgataaaaaaggtggggtattgttgatgtttttttacattaacggctaacaccaaattgcccgcaaaccctttatttatcggcgtttcagggcatcattatacgttattgcagtacggtggtcctgacggcgaagcaggcgctgcaatgcgttatatgtcacaaaaatatgctatgtctaatcctaaagttgcaggacttttaaacgatatcgcaactgaagaacttggacatttagaaatagttggaa

SEQ ID NO: 32825 - DNA, 74 bp, Unknown
  Description of Unknown: RightRegion for integrase B6826 sequence
gacggttcctgtaccgtaaacataggcgtacatttaagtcattgcggagacaggatttgaacctgcgacctccg

SEQ ID NO: 32826 - DNA, 260 bp, Unknown
  Description of Unknown: RightRegion for integrase B6827 sequence
aaaattgtatatgataaaaaaggtggggcattgttgatgtatttttatattaacgactaacaccaaattgcccgcaatccctttatttatcggtgtttcagggcatcgttatacgttatagcagtatggcggtcctgacggcgaagcaggcgctgcaatgcgttatatgtcacaaaaatatgctatgtctaatcctaaagttgcaggacttttaaacgatatcgcaactgaagaacttggacatttagaaatagttggaa

SEQ ID NO: 32827 - DNA, 260 bp, Unknown; identical to SEQ ID NO: 32781
  Description of Unknown: RightRegion for integrase B6828 sequence

SEQ ID NO: 32828 - DNA, 260 bp, Unknown
  Description of Unknown: RightRegion for integrase B6829 sequence
aggaataacaggtggcacaagtccggtgatttgtccttgaagatatttctcaaaatttgacgaaaacaaaatgttgcaaaaaaggaggtgatgcgctacaatataaactgtaatcttgtaaatgctgtttcatgtgcgtttgcatgattatggtttatttttttatccatcaaacacgcaaaagtgcatttcccccgtgcttttgtgttatatcttttaacgaccgagcggcaaaagtcgtaaaactgccgggtgtggac

SEQ ID NO: 32829 - DNA, 109 bp, Unknown
  Description of Unknown: RightRegion for integrase B6830 sequence
atttcggatatcgttgttgatcaggcacagaaggaaattcatttccactattacgcataataccgcaaacccagataaaagaagggtttgcggtattattataggtttc

SEQ ID NO: 32830 - DNA, 260 bp, Unknown
  Description of Unknown: RightRegion for integrase B6831 sequence
atttcggatatcgttgttgatcagacacagaaggaaattcatttccactattacgcataagcgccgcaaacccttattttatctgggtttgcggtattattataggtttctgccctttggcccaccatactgactcataataaactgcgccatcttcgcattcggttcctttatatttaccggaaactgcaatcttttttcgtagacccacatcttagcatcctccttcccatggccatttttcagttacccagttccag

SEQ ID NO: 32831 - DNA, 260 bp, Unknown
  Description of Unknown: RightRegion for integrase B6832 sequence
aaaatcgtgtatgataaaaaaggtggggcattgttgatgtatttttatattaacgactaacaccaaattgcccgcaacccctttatttatcggtgtttcagggcatcgttatacgttattgcagtacggtggtcctgacggcgaagcaggcgctgcaatgcgttatatgtcacaaaaatatgctatgtctaatcctaaagttgcaggacttttaaacgatatcgcaactgaagaacttggacatttagaaatagttggaa

SEQ ID NO: 32832 - DNA, 260 bp, Unknown
  Description of Unknown: RightRegion for integrase B6833 sequence
aaaattgtatatgataaaaaaggtggggcattgttgatgtatttttatattaacgactaacaccaaattgcccgcaatccctttatttatcggtgtttcatggcatcgttatacgttatagcagtatggcggtcctgacggcgaagcaggcgctgcaatgcgttatatgtcacaaaaatatgctatgtctaatcctaaagttgcaggacttttaaacgatatcgcaactgaagagcttggacatttagaaatagttggaa

SEQ ID NO: 32833 - DNA, 109 bp, Unknown; identical to SEQ ID NO: 32804
  Description of Unknown: RightRegion for integrase B6834 sequence

SEQ ID NO: 32834 - DNA, 260 bp, Unknown
  Description of Unknown: RightRegion for integrase B6835 sequence
aaaattgtatatgataaaaaaggtggggcattgttgatgtttttttacattaacgactaacaccaaattgcccgcaaaccctttatttatcggcgtttcagggcatcgttatacgttattgcagtacggtggaggatattgcaataacgtatgacggtttttatatagaagaaagtggtgattttttatagaaatttagggaaataatcttagattttaaaaggcttataaaaaaattcgggagcacccacaacaaagtt

SEQ ID NO: 32835 - DNA, 260 bp, Unknown
  Description of Unknown: RightRegion for integrase B6836 sequence
ctttccgaaattgtggtggaccgtcaaaaccgggaaatccactttcactactatgcataagacatgccgcaagcccttattttatgcggacttgcggcatcattataggtttctgcactacggcccaccatactgactcataataaactgcgccatcttcgcattcggttcctttatatttaccggaaactgcaatcttttttcgtagacccacatcttagcatcctccttcccatggccatttttcagttacccagttc

SEQ ID NO: 32836 - DNA, 260 bp, Unknown
  Description of Unknown: RightRegion for integrase B6837 sequence
gttgataaggtagtgtactctaaggaatccggaataatggatttttattttttgaattaacctactataactcgactatggcggtccggacggcgaagccggagcatcttttagatatctgtcgcagagatactcgatgaaagacagacgcgtagcgggagtgcttaccgatgtcggcacggaggaattggcgcatcttgagatagtcggtgccatggttcaccagctcacacgcgacctcacacctgaggagatagaga

SEQ ID NO: 32837 - DNA, 109 bp, Unknown
  Description of Unknown: RightRegion for integrase B6838 sequence
atgatgattgataaaatcctagtaggcgatgattcccctattcagattatttggaagtaactcaagaaactatttcttttctcgtcagcagcgtctgcatgaaccacgc

SEQ ID NO: 32838 - DNA, 260 bp, Unknown
  Description of Unknown: RightRegion for integrase B6839 sequence
gtcgataaagtaatatactctaaagagtccaatacaatggatttttatttttttaactaacataccacaacacgattacggcggtccggacggcgaagccggagcatctttcagatatctgtcgcagagatattcgatgaaagacagacgcgtagcgggagtattgacagatattggaactgaagaattggcgcatcttgagatagtcggtgccatggttcaccagctcacacgcgacctcacacctgaagagatagaga

SEQ ID NO: 32839 - DNA, 260 bp, Unknown
  Description of Unknown: RightRegion for integrase B6840 sequence
gtaaccgctgctctgcgggagagttcgtgcagtgttgcgtgtggtggaggcgatgcgtgactatctttttttgcgtattttcaagatttcggaagtgcgacaccacgcagatgcgtggtttttcgctatcaagatctttaaaaaattgttgtagatgaattcttcatgctctactttggatcgcttttacatagtatatcgtatgggggatgttaagtagcacagcatttttcaaatccgattaaaaactcttttttaag

SEQ ID NO: 32840 - DNA, 260 bp, Unknown
  Description of Unknown: RightRegion for integrase B6841 sequence
ttaattgataaaattgttgtcctgaatgaggacattgagattcactggactttctgttaatccggaagctccaggaggcagattgtctcaatgtgcacggtgtgcacgaactgatcaacgcagctcatccgcttcaccctgtatccagcagcctggaatgctacaaggtcgcgggcgaggctggttggcttgcaggcaatgtaaacaactttcttacacctatatgaatcaataatcttcgggagtgccttcgggtgaat

SEQ ID NO: 32841 - DNA, 109 bp, Unknown
  Description of Unknown: RightRegion for integrase B6842 sequence
aaaatcgtctacaacaagaaagaagattcaatttccatgtttttctacataaatgactaagcaaaaaaacacccgcaatccctttatttatcgtgggttgcggggtgta

SEQ ID NO: 32842 - DNA, 260 bp, Unknown
  Description of Unknown: RightRegion for integrase B6843 sequence
gggatacaagtcgaatggacgaatgacacaaagcgtgttattgacatcacatttttataatatttttttgcctattttgtttgtacataattcgcgggccaaacggcgcagaaattaaatacaaacaaaaatacagataaacccgccgaaatggcgggtttttgctttaggtgaattcgatttcggcggttgcctcgatctggattgcgcattccgcgttattggcgggggtgctgttaaaggtcggggcgcatgtaatc

SEQ ID NO: 32843 - DNA, 260 bp, Unknown
  Description of Unknown: RightRegion for integrase B6844 sequence
gacagaaaaagcaataccctgacattttacctgtattgttccgattcccgcgagggctgatttgttatatgtacttacactagggtccaccatattgtgagagaatgatctgcgcgatctttgcgtttggtgttttgatattgaccggatattccagacgcttttcataattccacatatttaacagtcgcctccttcccatggccatggctgctgcatccagttccatgcttcagttggtgaggcagaggctgtgtcaa

SEQ ID NO: 32844 - DNA, 260 bp, Unknown
  Description of Unknown: RightRegion for integrase B6845 sequence
cggataattgaaaagatagttgtgtatcctgataagtcggtggagatatttatgaagtaaaatataacgtgaatttgtgttatatttagtataagaggtaagcaagtcgcaaaacgtgttttgaagcaaataaacaaccgtgactatgtatcaaaagcggaggaagacggttccaagaatattatcaaatgcggagtggtatttaaaggtgaaatgtgctatgccgttgcggagtgatagaaaattataaaaagacttgt

SEQ ID NO: 32845 - DNA, 260 bp, Unknown
  Description of Unknown: RightRegion for integrase B6846 sequence
aaaattgagtataataaagaaaatgatactttgtacttcgatttgtatatggttgaatagtccgaaatttggttgttttttatgctatataccttacagaatacagttcagccaatggggttccaaggcacttggcgaccaagggtacacggccattgaaattctccgcaactactacggcgattccatttatattaattccaccgatgaaatctccggtattccatcctcgtatcccggctcgccgctccgtgtgggcg

SEQ ID NO: 32846 - DNA, 260 bp, Unknown
  Description of Unknown: RightRegion for integrase B6847 sequence
gtggaccgcatcattttcgacaataaaacaaaaacggtgaccatcgtgtactacgaatgacccctccatttactcttaattatagttttggttgaatgaatttttaggaaaaaatactattgaatatgcgcattgacaaatatgcacatacgtgtcataattcaagtagagaataggcagaaaggagtaacgattatggccactaattttcgatctgttccagttcaagcggtttgcaatacgatactgaaaaaatcgtt

SEQ ID NO: 32847 - DNA, 260 bp, Unknown
  Description of Unknown: RightRegion for integrase B6848 sequence
aaatacattgagtatgaccgcaaaaatgaccgtatggacgtgcattattacatatcctgaacaccattatgagaagttgacatttggcggacccgacggggagatgggggcctccatgcgctatctctcccagcgctacgccatgccctacaaggaatgtaagggcgcgctgaccgacatcggcactgaggaactgggccacctggaaattgtggctgccattatccaccagctgaccagaggtttaagcgcccaggagc

SEQ ID NO: 32848 - DNA, 109 bp, Unknown
  Description of Unknown: RightRegion for integrase B6849 sequence
cggataattgaaaaaatagttgtgtatccggataagtcggtggaaatatttatgaagtaaaatataacgttgataaaggtaaaaatttgtgttatacttacattatacg

SEQ ID NO: 32849 - DNA, 260 bp, Unknown
  Description of Unknown: RightRegion for integrase B6850 sequence
cggataattgaaaagatagttgtgtatcctgataagtcggtggagatatttatgaagtaaaatataacgttgataaaggtaaaaatttgtgttatacttacattatacaaatacgggaggcgagaatatgttattgacaaacggtaaaaagagaatacccataggctatgaagatttcaaacagcttatagacagcggcttctattatgttgataagtcaatgtttatctatgaacttctgcatagcggcggacagaata

SEQ ID NO: 32850 - DNA, 260 bp, Unknown
  Description of Unknown: RightRegion for integrase B6851 sequence
aaatgctattttgataaatcaaagatgctgctgacgatttcatacaatttcagcgtttgatttttatccccgaaatcttagtaagatggagtccgaccctccttactccatcttactaagattatttctttcgcacgatccccctataatacgcgcacagctttgcctccggaccggggccgtccttgtccatcagaaacgcctctgccagcgcagcgtaaaactccggacgattcacgccgaagtccacggcgacgccg

SEQ ID NO: 32851 - DNA, 260 bp, Unknown
  Description of Unknown: RightRegion for integrase B6852 sequence
aaaattgagtataataaagaaaatgatactttgtacttcgatttgtatatggttgaatagtccgaaatttggttgttttttatgctatacaccttgcagaatacagtttagccaatggggttccaaggcacttggcgaccaagggtacacggccattgaaattctccgcaactactacggcgattccatttatattaattccaccgatgaaatctccggtattccatcctcttatcccggctcgccactccgtgtaggcg

SEQ ID NO: 32852 - DNA, 260 bp, Unknown
  Description of Unknown: RightRegion for integrase B6853 sequence
aaaattgagtataataaagaaaatgatactttgtacttcgatttgtatatggttgaatagtccgaaatttggttgttttttatgctatacaccttacagaatacagttcagccaatggggttccaaggcacttggcgaccagggatacacagccatcgaaattctccgcaactactacggcgattccatttatattaattccaccgatgaaatctccggtattccatcctcttatcccggctcgccgctccgtgtaggcg

SEQ ID NO: 32853 - DNA, 260 bp, Unknown
  Description of Unknown: RightRegion for integrase B6854 sequence
ataaaaaaaattgttttcgaccgtcagatgaatgaatttcatttctactactatgcttagctgatcgtcacaaattatcaggctatttccagttgacataatactccattttttagtaaataacaatatatataaaaccccggaattccttgtaaacacaaggttttccgggcattcctataggtttatgcattttgggcccccggattgtaaaaacagataatgtattaaggtatctggctgcatactctgacagtgtg

SEQ ID NO: 32854 - DNA, 260 bp, Unknown
  Description of Unknown: RightRegion for integrase B6855 sequence
attgaaaagattgtatttgatagaaaagaaaacagtattgagattttctattatctataaaaacataaaaagccagtgatccgaatggatgcactggcttttatcataaggtatttatattagggccaccaaatataaataagatataaaaattttcacattgtacagcgggaggttttttataccctattgttttacttatcacaaacggtcagttctctgagatcctccatcaacttggtaactgtgccatttccacc

SEQ ID NO: 32855 - DNA, 109 bp, Unknown
  Description of Unknown: RightRegion for integrase B6856 sequence
attaaaaaaattgttttcgaccggcagatgaacgaattccatttctactactatgcgtagatgattaccacagaattccagactgtctcagttgacataatacaccatt

SEQ ID NO: 32856 - DNA, 260 bp, Unknown
  Description of Unknown: RightRegion for integrase B6857 sequence
gacagaaaaagcaataccctgacattttacctgtattgttccgattcccgcgagggctgatttgttatatgtacttacactagggtccaccttagtgcaagtacatataagccacaaaagcaaggtgtgtggtatgccgcggcaggttatctgccgcggtttcttcttattatttttatggaattcttttttcgaatgtttatatcaatatattaaaaaaagtcaagacttttttgtcgtttttcacaatgtgaaaatgt

SEQ ID NO: 32857 - DNA, 260 bp, Unknown
  Description of Unknown: RightRegion for integrase B6858 sequence
aaaattgagtataataaagaaaatgatactttatacttcgatttgtatatggttgaatagtccgaaatttggttgttttttatgctatataccttacagaatacagtttagccagtggggatccaaggcacttggtgaccagggatacacagccatcgaaattctccgcaactactacggcgattccatttatattaattccaccgatgaaatctccggtattccatcctcttatcccggctcgccgctccgtgtgggcg

SEQ ID NO: 32858 - DNA, 260 bp, Unknown
  Description of Unknown: RightRegion for integrase B6859 sequence
atgatgattgataaaatcctagtaggtgatgattcccctattcagattatttggaagtaactcaagaaactatttcttttctcgtcaagaaggaaatagaaacttaaacgtgcagatatacaaaaaagacctagggcaatcaccctaggtctttctgcgcctacccattttgccgaaatcggcaaataggtttacttcttatccagtgtgcccatcttgtccaacacggtcagcgtgcggcacaaatcttcggacacgtt

SEQ ID NO: 32859 - DNA, 260 bp, Unknown
  Description of Unknown: RightRegion for integrase B6860 sequence
ataaaaaaaattgttttcgaccgtcagatgaatgaattccatttctactactatgcttagcagattgtcacagattatcagactatctcgagttgacataacactccattttttagtaaataacaagatatataaacccccggaattccttgtaaatacaaggttttccgggctttcctataggtttacgcatttggggccaccatactgactcataataaacgtcgccattttcggattcggtgttgtaatatttaccg

SEQ ID NO: 32860 - DNA, 260 bp, Unknown
  Description of Unknown: RightRegion for integrase B6861 sequence
attaaaaaaattgttttcgaccggcagatgaacgaattccatttctactactatgcgtagatgattaccacagaattccagactgtctcagttgacataatacaccattttttagtaaataacaagatatataaaatgcccggaatcccttgtaaatacaaggttttccaggcattcctataggtttatgcattttgggccgccatactgactcataataaacgtcgccagcttaggattcggtgttgtaatatttaccg

SEQ ID NO: 32861 - DNA, 260 bp, Unknown
  Description of Unknown: RightRegion for integrase B6862 sequence
aaatgctattttgataaatcaaaaatgctgctgacggtttcatataatttcagcgtttgattttagccccgaaatcttagctagatggagtccggccctccttactccatcttactaagattattctttcggacgatccctctataatacgcgcacagctttgcctccgggccggggccgtccttgtccgtcagaaacgcctctgccagggctgcgtagaactccgggcggttcacaccgaagtccacggcgacgccgta

SEQ ID NO: 32862 - DNA, 260 bp, Unknown
  Description of Unknown: RightRegion for integrase B6863 sequence
cggataattgaaaatatagttgtgtatcctgataagtcggtggaaatatttatgaagtaaaatataacgtgaatttgtgttatatttagtataagaggaaacgtgttttgaagcaaataaacaaccgtgactatgcatcaaaagcgaaggaagacggttacaagaatattatcaaatgcgaagtagcatttaaaggtaaaatgtgctatgccgttgcggagttacagtaaattataaaaaaacttgttgtgagtagaaac

SEQ ID NO: 32863 - DNA, 260 bp, Unknown
  Description of Unknown: RightRegion for integrase B6864 sequence
aaaattgagtataataaagaaaatgatactttgtacttcgatttgtatatggttgaatagtccgaaatttggttgttttttatgctatacaccttgcagaatacagttcagccagtggggttccaaggcacttggcgaccaagggtacacgtccattgaaattctccgcaactactacggcgattccatttatattaattccaccgatgaaatctccggtattccatcctcttatcccggctcgccgctccgtgtgggtg

SEQ ID NO: 32864 - DNA, 260 bp, Unknown
  Description of Unknown: RightRegion for integrase B6865 sequence
aatggcgactgcgaccttgaagtaggcgtacatataaatggttgcgggagccagatttgaactgacgaccttcgggttatgagcagctctaacgcaagtgaaaaatcccatgcaacacaatcattttcagacttcatataccgcttttgccgacgagatgacgacgcagatgtcgacttaagtagtacaatgacaaaatgaggcacacactttccgctgttccttgaaaagtgtttctacaaacacgggaaatatttttg

SEQ ID NO: 32865 - DNA, 260 bp, Unknown
  Description of Unknown: RightRegion for integrase B6866 sequence
aatggtgactgtgaccttgaagtaggcgtacatataaatggttgcgggagccagatttgaactgacgaccttcgggttatgagcagctctaacgcaagtgaaaaatcccatgcaacacaatcattttcagacttcatataccgcttttgccgacgagatgacgacgcagatgtcgacttaagcagtgcaatgacaaaatgaggcacacactttccgctgtttcttgaaaagtgtttctacaaacacgggaaatatttttg

SEQ ID NO: 32866 - DNA, 109 bp, Unknown
  Description of Unknown: RightRegion for integrase B6867 sequence
gtggaccgcatcattttcgacaataaaacaaaaacggtgaccatcgtgtactacgaatgatcaccgataaaaaagagggcgtttctgctctctttttcgtttattacct

SEQ ID NO: 32867 - DNA, 260 bp, Unknown
  Description of Unknown: RightRegion for integrase B6868 sequence
aaaattgagtataataaagaaaatgatactttgtacttcgatttgtatatggttgaatagtccgaaatttggttgttttttatgctatacaccttacagaatacagttcagccaatggggttccaaggcacttggcgaccaagggtacacggccattgaaattctccgcaactactacggcgattccatttatattaattccaccgatgaaatctccggtattccatcctcgtatcccggctcgccgctccgtgtgggcg

SEQ ID NO: 32868 - DNA, 260 bp, Unknown
  Description of Unknown: RightRegion for integrase B6869 sequence
ttaattgataaaattgttgtcctgaatgaggacattgagattcactggactttctgttaatccggaagctccaggaggcagattgtctcaatgtgcacggtgtgcacgaactgatcaacacagctcatccgcttcaccctgtatccagcagcctggaatgctacaaggtcgcgggcgaggctggttggcttgcaggcaatgtaaacaactttcttacacctatatgaatcaataatcttcgggagtgccttcgggtgaat

SEQ ID NO: 32869 - DNA, 260 bp, Unknown
  Description of Unknown: RightRegion for integrase B6870 sequence
aaaatcgtctacaacaagaaagaagattcaatttccatgtttttctacataaatgactaagcaaaaaagcacccgcaatccctttatttatcgtgggttgcggggtgtattatacgttgttgatgtatggtggtcctgacggtgaggctagcgcagcgttcagatatatgtctcagaaattcacttttaaaaatcctagagttgcaggacttttaaatgatatagcatgtgaagaactttcacaccttgaaatagtggga

SEQ ID NO: 32870 - DNA, 109 bp, Unknown
  Description of Unknown: RightRegion for integrase B6871 sequence
ataaaaaaaattgttttcgaccgtcagatgaatgaatttcatttctactactatgcttagctgatcgtcacagattatcaggctatttccagttgacataatactccat

SEQ ID NO: 32871 - DNA, 109 bp, Unknown
  Description of Unknown: RightRegion for integrase B6872 sequence
ttaattgataaaattgttgtcctgaatgaggacattgagattcactggactttctgttaatccggaagctccaggaggcagatggtctccacatgtactgtgtggcaga

SEQ ID NO: 32872 - DNA, 260 bp, Unknown
  Description of Unknown: RightRegion for integrase B6873 sequence
aaaattgagtataataaagaaaatgatactttgtacttcgatttgtatatgattgaatagtccgaaatttggttgttttttatgctatataccttacagaatacagttcagccaatggggttccaagtcacttggcgaccaagggtacacggccattgaaattctccgcaactactacggcgattccatttatattaattccaccgatgaaatctccggtattccatcctcttatcccggctcgccgctccgtgtgggcg

SEQ ID NO: 32873 - DNA, 260 bp, Unknown
  Description of Unknown: RightRegion for integrase B6874 sequence
cggataattgaaaagatagttgtgtatccggataagtcggtggaaatatttatgaagtaaaatataacgttgataaaggtaaaaatttgtgttatacttacattatacgaatacgggaggcgagaatatgttattgacaaacggtaaaaagagaatacccataggctatgaagatttcaaacagcttatagacagcggcttttattatgttgataagtcaatgcttatctatgaacttctgcatagcggcggacagaata

SEQ ID NO: 32874 - DNA, 260 bp, Unknown
  Description of Unknown: RightRegion for integrase B6875 sequence
aaaattgagtataataaagaaaatgatactttgtacttcgatttgtatatggttgaatagtccgaaatttggttgttttttatgctatataccttacagaatacagttcagccagtggggttccaaggcacttggcgaccaagggtacacgtccattgaaattctccgcaactactacggcgattccatttatattaattccaccgatgaaatctccggtattccatcctcttatcccggctcgccgctccgtgtgggtg

SEQ ID NO: 32875 - DNA, 260 bp, Unknown
  Description of Unknown: RightRegion for integrase B6876 sequence
aaaatagtttatgataagaaaaatcattccttgttgatgtttttttatattaatgattgagtgaaaatgtccgcaacctcccataaataaaggggttgcgagcaatcgtcatacgttattgcagtatggtggacccgatggcgaagctagtgctgccatgcgttatatgtctcaaaaatatgccatgaaaaattcccgtgttgccggattgttgaacgatatcgcaactgaagaattggtggtttgactttatcatttat

SEQ ID NO: 32876 - DNA, 260 bp, Unknown; identical to SEQ ID NO: 32867
  Description of Unknown: RightRegion for integrase B6877 sequence

SEQ ID NO: 32877 - DNA, 260 bp, Unknown
  Description of Unknown: RightRegion for integrase B6878 sequence
aacggcgattgtgaccttgaagtaggcgtacatatggatggcaaagaacctaatctttaatacaatgaaacccttttagatttccgtttctttgctgttttgatgtttcgttgcatatacttgcaacattggcaatataaagattcttttattttctaatccacctatttatacatgttttcttcgcttgacaataaatgctatgattgatattaaaagaattacacccaatccaaatccaataccaatccagattctgt

SEQ ID NO: 32878 - DNA, 260 bp, Unknown
  Description of Unknown: RightRegion for integrase B6879 sequence
gaaaagattgtgtttgaccggcaggcagacagcatcgaaatctactattacatacaatgaatcggctttttaaagaggcaccggattttccggtgcctctttgtatcttgttgatgtctgggcctcccagctgtgagataatcaccttagcggcggcagcatcgggtcgggcaatctttaccggatattccagctttttgctataagtccacatcgcttactcctcccttctcctggtcagcgttcaggtcccacggcca

SEQ ID NO: 32879 - DNA, 109 bp, Unknown
  Description of Unknown: RightRegion for integrase B6880 sequence
ctcgcaaaaatcatatatcacaagcctgcgcaatcccttgagctttatttctatgcgtaaggagtttcccgcttcacatccgcgcacttgaaaattatatctaaaagca

SEQ ID NO: 32880 - DNA, 260 bp, Unknown
  Description of Unknown: RightRegion for integrase B6881 sequence
aacggtgattgtgatttggaagtaggcgtacatatttcgggttgcgggagccagatttgaactgacgacctccgggttatgagagatttattttatatttttgatacattttagacatacgcaaatcgtacaataatggcgatattgcgttatttttttatttcgatgtttatcagattacgcactgcatacataatattggggtcagttttggggtcaaaaaacgaatcattttttgacccgttcaattttgcaagtgt

SEQ ID NO: 32881 - DNA, 109 bp, Unknown
  Description of Unknown: RightRegion for integrase B6882 sequence
ataaaaaagatagtttacataaaagagagtaaaacgttctgcttttactactatgtatagccccggaagccttgatttataaggctttgcgggcacattatatgttttt

SEQ ID NO: 32882 - DNA, 260 bp, Unknown
  Description of Unknown: RightRegion for integrase B6883 sequence
atcatttttaacagaaaaaagaatttgtttgagatcgtgtaccgggatccgtttgcatagtatcgtactatatccttttgcaattagcaccgccaagcttcaaaaggatataatagaaacagatgcaactttttcgcactgaacttgtacttttatgtacaagtttcacgggattatagctactgataaggaaagtcaatttgtaaaagtgattagacaggtcgaacaaaataatacaacactatatattgtgttttttt

SEQ ID NO: 32883 - DNA, 260 bp, Unknown
  Description of Unknown: RightRegion for integrase B6884 sequence
ataaaagaaataatattatatcctgataagatggagattcactgggcttttgcaatttaacaatattatctaacgttgttcactactccaataaaaccaatgttaattggttcagcagcagtaccgacgtttttaatcgtatatggtttccagccataaggaatagagccgtctttttcgtgtacgttcgctataactaaatcaaaaccgccttttaactcgtcttgagaataatcttcgttgtattccttaacgatcgg

SEQ ID NO: 32884 - DNA, 260 bp, Unknown
  Description of Unknown: RightRegion for integrase B6885 sequence
aacggtgattgtgatttggaagtaggcgtacatatttcgggttgcgggagccagatttgaactgacgaccttcgggttatgagggatttatttcatatttttgatacatttcagatatacgcaaatcgtacgataatggcgatattgcgttatttttttattttgatgtttgtcagcttacgcattgtgtacactatattggggtcagttttggggtcaaaaacaattgaagcattatgagatgcatttcagaaattaaa

SEQ ID NO: 32885 - DNA, 109 bp, Unknown
  Description of Unknown: RightRegion for integrase B6886 sequence
tcattgatagataagattttagtcaagaaaggttttattaaaatcctatggaaaatttagtctttctttagaggtatttagatacaggcattgttacacgtgtaacaga

SEQ ID NO: 32886 - DNA, 260 bp, Unknown
  Description of Unknown: RightRegion for integrase B6887 sequence
gaattcatcgagcggatcgaactcgacggcaaccatgtcaacatcatttggaaggcctgatggggctgcacaattgcgtgcgcttcatcgggctctttcatagtctgcaccaattttttatcacgctacaaacatccgaataaagggtcgtcatacaatttgcgctccttgccatgagcaacaagaaagaaggatctcaatgaaaaatcgcattctgtccgtccgcctctcagaggacgaacgcaatgatcagtgaggag

SEQ ID NO: 32887 - DNA, 260 bp, Unknown
  Description of Unknown: RightRegion for integrase B6888 sequence
gaatttatcgagcgaatcgaactcgacggcaaccatgtcaacatcatttggaaggcctgatggggctgcacaattgcgtgcgcttcatcgggctctttcatagtctgcaccaattttttatcacgctacaaacatccgaatatctgccatcttttccctgggcaccaagtcgtataggccctgcacacggactctgcgcactgtcatctgcattttgtcgtgaactcggtctcctttgaagacggcaaaaagcacttcag

SEQ ID NO: 32888 - DNA, 260 bp, Unknown
  Description of Unknown: RightRegion for integrase B6889 sequence
aagagtttgagtataaaatttaatatacgtaaggaaatagaagaaattgtgaatagttaatgctaattacaaggtgtaattagcaaaatattttgtagtctaatattttacaccagtaaacttttgcttgttaactttttctgataaatggtatataaatataggtaatataaaaaataaatgaattgttgaatatattgttttaactatgggggtcgtcattttttggcggcctattttttttatgcataaatatataa

SEQ ID NO: 32889 - DNA, 260 bp, Unknown
  Description of Unknown: RightRegion for integrase B6890 sequence
gaatttatcgagcggatcgaactcgacggcaaccatgtcaacatcatttggaaggcctgatggggctgcacaattgcgtgcgcttcatcgggctctttcatagtctgcaccaattttttatcacgctacaaacatccgaataaaggggcgtcatacaatttgcgctccttgccacgagcaacaagaaagaaggatttcaatgaaaaatcgcattctgtccgtccgcctctcagaggacgaacgtaatgatcagagaggag

SEQ ID NO: 32890 - DNA, 109 bp, Unknown
  Description of Unknown: RightRegion for integrase B6891 sequence
aacgccacaaaagaaggagccgcctcgaggtgttcgagtacggctcaattagtggagtagacgggagtcgaacccgtgtccaaaagcctattccctgtccttctacgag

SEQ ID NO: 32891 - DNA, 109 bp, Unknown
  Description of Unknown: RightRegion for integrase B6892 sequence
atcatttttaacagaaaaaagaatttgtttgagatcgtgtaccgggatccgtttgcatagcgcattactatatccttttgcaattagcaccgcccaactgggtaatgat

SEQ ID NO: 32892 - DNA, 260 bp, Unknown
  Description of Unknown: RightRegion for integrase B6893 sequence
atagttatagacgaaaaaaatatgaaaatactactaacatacaatgaaagtcccttttgaaattaggcggtccaaacggggaacttggcgcttgcttaagatatctttgtcaaagatttactatgcctgatgaaaaaggaagaacactactttcagatattggttgtgaagaaattggtcactgcgaaatgatatcttctatgatgtatcaacttatgcgaggcgctagtattgaagaaataaaaagtgctggcttaaat

SEQ ID NO: 32893 - DNA, 260 bp, Unknown
  Description of Unknown: RightRegion for integrase B6894 sequence
aacggcgattgtgaccttgaagtaggcgtacatatgaatggttgcgggagccagatttgaactgacgaccttcgggttatgagcaactctaacgcaagtgaaaaatcccatgcaacacaatcattttcagacttcatataccgctttcgccgacgagatgacgacgcagatgtcgacttaagtagtacaatgacaaaatgaggcacacattttccgctgttccttgaaaagtgtttctacaaacacgggaaatatttttg

SEQ ID NO: 32894 - DNA, 109 bp, Unknown; identical to SEQ ID NO: 32881
  Description of Unknown: RightRegion for integrase B6895 sequence

SEQ ID NO: 32895 - DNA, 260 bp, Unknown
  Description of Unknown: RightRegion for integrase B6896 sequence
gaatttatcgagcgaattgaactcgacggcaaccatgtcaacatcatttggaaggcctgatggggctgcacaattgcgtgcgcttcatcgggctctttcatagtctgcaccaattttttatcacgctacaaacatctgaataaagggtcgtcatacaatttgcgctccttgccacgagcaacaagaaagaaggatttcaatgaaaaatcgcattctgtccgtccgcctctcagaggacgaacgaaatgatcagtgaggag

SEQ ID NO: 32896 - DNA, 260 bp, Unknown
  Description of Unknown: RightRegion for integrase B6897 sequence
gaattcatcgagcgaatcgaactcgacggcaaccatgtcaacatcatttggaaggcctgatggggctgcacaattgcgtgcgcttcatcgggctctttcacagtctgcaccaattttttatcacgctacaaacatccgaatatctgccatcttttccctgggcaccaagtcgtatatgccctgcacacggactctgcgcactgtcatctgcatcttgtcgtgaactcggtctcctttgaagacggcaaaaagcacttcag

SEQ ID NO: 32897 - DNA, 260 bp, Unknown
  Description of Unknown: RightRegion for integrase B6898 sequence
gaaaagcccagaagtttcaacgacttccgggcttttttgcgcccatttttagaggcgtgacaaaaagatgccaaaatgggctttggcaaattcgatggacctgtacctttacccaaggctttttgagccgcttttccgaggatttttcgggaaagcggctcgttcttgctctcggcaaaacgtagaatttgagcaggcttttttgttggtgttgctggatagacattccgagtgtatgtgccattgtgttgacacgggca

SEQ ID NO: 32898 - DNA, 109 bp, Unknown
  Description of Unknown: RightRegion for integrase B6899 sequence
gtcgaccacatcacctatgataaggctaatcagcgtctcgtcatatatttttacagttgatatatatctaaatgcagtacggcggccctgacggcgagctcggcgcgtc

SEQ ID NO: 32899 - DNA, 260 bp, Unknown
  Description of Unknown: RightRegion for integrase B6900 sequence
gaacaaatcatatatgataaggaatccggaaaaatgtcttttgacatcattatttcctgaatttcatccatccataaaaaagtgctatttcggcctttttaacatttttgtaatattttttctgagttaaaaatcccacaaacccgcataaacactgggtttgcggggctattatagggtactgcactccggtggcccggacggtgaaatcagcgcttccctgcgttatctttcccagcgttttaccatgccgaaccgaa

SEQ ID NO: 32900 - DNA, 109 bp, Unknown; identical to SEQ ID NO: 32881
  Description of Unknown: RightRegion for integrase B6901 sequence

SEQ ID NO: 32901 - DNA, 260 bp, Unknown
  Description of Unknown: RightRegion for integrase B6902 sequence
gagcagatcatatatgataaggaatccggaaaaatgtcttttgacatcattatttcctgaattgaaaatcccgcaaacccgcataaacactgggtttgcgaggctattatagggtactgcactccggtggcccggacggtgagatcggcgcttccctgcgttatctttcccagcgttttaccatgccgaaccgaacgacttctgctttgctcaacgacataggaacagaagaatcagctcatagctgttgtcattttaat

SEQ ID NO: 32902 - DNA, 260 bp, Unknown
  Description of Unknown: RightRegion for integrase B6903 sequence
cttgactggggaaaaggcaggtacgggaaaaaggacattaaagacatcacttttttttgaccgctgtatgttcttaattactgcacctaatggcgcgggcaagagcaccttggtcaagctgatgacgggcatcctgacgccgacgagcggcagctgcacggtggatgggcgcacgccgtgggcggagcggaaggcgcatgtgcgcagcctcggcgcagtgttcgggcagcggatgcagctctggtgggacgtgccgattc

SEQ ID NO: 32903 - DNA, 260 bp, Unknown
  Description of Unknown: RightRegion for integrase B6904 sequence
gaattcatcgagcggatcgaactcgacggcaaccatgtcaacatcatttggaaggcctgatggggctgcacaattgcgtgcgcttcatcgggctctttcacagtctgcaccaattttttatcacgctacaaacatccgaataaagggacgtcatacaatttgcgctccttgccacgagcaacaagaaagaaggatttcaatgaaaaatcgcattctgtccgtccgcctctcagaggacgaacgaaatgatcagagaggag

SEQ ID NO: 32904 - DNA, 260 bp, Unknown
  Description of Unknown: RightRegion for integrase B6905 sequence
gaatttatcgagcgaatcgaactcgacggcaaccatgtcaacatcatttggaaggcctgatggggctgcacaattgcgtgcgcttcatcgggctctttcatagtctgcaccaattttttatcacgctacaaacatctgaataaagggtcgtcatacaatttgcgctccttgccatgagcaacaagaaagaaggatttcaatgaaaaatcgcattctgtccgtccgcctctcagaggacgaacgcaatgatcagtgaggag

SEQ ID NO: 32905 - DNA, 260 bp, Unknown
  Description of Unknown: RightRegion for integrase B6906 sequence
aacggcgattgtgaccttgaagtaggcgtacatatgaatggaaacgcacgtcacaaatgatacaatgcacacccaccaagcaaagggagtgcgttctgcaccccacacccctcaaattttctgcaccaactccgtcccatctttcaaaacaaacacgatttttccatctcgatgcaccactgctttttctacagcagccagccacaactgcgtgtcaaattccggcagcatcccattttgtccgcttaatgctctttgaa

SEQ ID NO: 32906 - DNA, 260 bp, Unknown
  Description of Unknown: RightRegion for integrase B6907 sequence
aacggtgattgtgatttggaagtaggcgtacatatttcgggttgcgggagccagatttgaactgacgacctccgggttatgagggatttatttcacatttttgatacatttcagacatacgcaaatcgtacaataacggcgatattgcgttatttttttattttgatgtttgtcagcttacgcactgtgtacactatattggggtcagttttggggtcaaaaaacgaatcattttttgatccgttcgatcttacaagtat

SEQ ID NO: 32907 - DNA, 109 bp, Unknown
  Description of Unknown: RightRegion for integrase B6908 sequence
ataaaaaagatagtttacataaaagagagtaaaacattctgcttttactactatgtatagccctggaagccttgatttataaggctttgcgggcacattatatgttttt

SEQ ID NO: 32908 - DNA, 260 bp, Unknown
  Description of Unknown: RightRegion for integrase B6909 sequence
gttgaaaaggtcgtgtatgataaggcagcgaatagtattcggctgtttttgattgattgaatatataggtataccctaatgcagtatggcggttgcgatggggaatggggcgctgcccatcggtatttgagccagcgctattccatggtaacaccggaagccaaagccacactcaatgacattgccacagaagaattggggcatgcagaaatcatgggcaccatcgtccgccagcttatgcagggtctgaccaaagacca

SEQ ID NO: 32909 - DNA, 260 bp, Unknown
  Description of Unknown: RightRegion for integrase B6910 sequence
gaattcatcgagcggatcgaactcgacggcaaccatgtcaacatcatttggaaggcctgatggggctgcacaattgcgtgcgcttcatcgggctctttcatagtctgcaccaattttttatcacgctacaaacatccgaataaagggtcgtcatacaatttgcgctccttgccacgagcaacaagaaagaaggatttcaatgaaaaatcgcattctgtccgtccgcctctcagaggacgaacgtaatgatcagagaggag

SEQ ID NO: 32910 - DNA, 260 bp, Unknown
  Description of Unknown: RightRegion for integrase B6911 sequence
aacggcgattgtgaccttgaagtaggcgtacatatgaatggttgcgggagccagatttgaactgacgaccttcgggttatgagggatttatttcacattttcgatacatttcagacatacgcaaatcgtacgataatggcgatattgcgttatttttttattttgacgttcgtcagcttacgcactgcgtacagtatattggggtcagttttggggtcaaaattaatccatctatttgatttgccaacattcaatttcac

SEQ ID NO: 32911 - DNA, 260 bp, Unknown
  Description of Unknown: RightRegion for integrase B6912 sequence
aacggcgattgcgaccttgaagtaggcgtacatatggatggcaaagagcctaatctttaatacaatgcaactcttttagatttccgtttctttgctgttttgatgtttcgttgcatatacttgcaatatatgcaagtattatcactgaaataggtataataaaaaaagaacatttttgaaactaaaagggtgcattttttcatttataaagttatcgtttcggaattaattttgaaggcaaacctgtctgatgatatgtt

SEQ ID NO: 32912 - DNA, 260 bp, Unknown
  Description of Unknown: RightRegion for integrase B6913 sequence
ataaaagaaataatattatatcctgataagatggagattcactgggcttttgcaatttaacaatattatctaacgttgttcaccactccaataaaaccaatgttaattggttcagcagcagtaccgacgtttttaatcgtatatggtttccagccataaggaatagagccgtctttttcgtgtacgttcgctataactaaatcaaaaccgccttttaactcgtcttgagaatagtcttcgttatattccttaacgatcgg

SEQ ID NO: 32913 - DNA, 109 bp, Unknown
  Description of Unknown: RightRegion for integrase B6914 sequence
atagttgtagatgaaaaaaatatgaaaatactgctaacgtacaatgaaagtcccttttgaaattaggtggtccaaacggggaacttggcgcttgcttaagatatctttg

SEQ ID NO: 32914 - DNA, 260 bp, Unknown
  Description of Unknown: RightRegion for integrase B6915 sequence
tccgtgattttcgaccgcgaaaataacctactgcgggtgtattatcacgctgcgcagtaactccggcgcagtggtacatgttggtgtaaggcggtcgatacaccatcatgtactacttataactgattccacgcctcggccagctgcgggttgctctgcatggttgcgcgcagggcgtccggggcatgggtatccagtatgtcatgcaacacggtggcatgctgcttttcgtcccgccgaatcagctccagcagcatggc

SEQ ID NO: 32915 - DNA, 260 bp, Unknown
  Description of Unknown: RightRegion for integrase B6916 sequence
cttgactggggaaaaggcaggtacgggaaaaaggacattaaagacatcacttttttttgaccgctgtatgttcttaattactgcacctaacggcgcgggcaagagcaccttggtcaagctgatgacgggcatcctgacgccgacaagcggcagctgcatggtggatgggcgcacgccgtgggcggagcggaaggcacatgtgcgcagcctcggcgcggtgttcgggcagcgaatgcagctctggtgggacgtgccgattc

SEQ ID NO: 32916 - DNA, 109 bp, Unknown
  Description of Unknown: RightRegion for integrase B6917 sequence
atcatttttaacagaaaaaagaatttgtttgagatcgtgtaccgggacccgtttgcatagcgccctactatatccttttgcaattagcaccgcccaactgggtaatgat

SEQ ID NO: 32917 - DNA, 260 bp, Unknown
  Description of Unknown: RightRegion for integrase B6918 sequence
gaatttatcgggcggatcgaactcgacggcaaccatgtcaacatcatttggaaggcctgatggggctgcacaattgcgtgcgcttcatcgggctctttcacagtctgcaccaattttttatcacgctacaaacatccgaatatctgccatcttttccctgggcaccaagtcgtataggccctgcacacggactctgcgcactgtcatctgcattttgtcgtgaactcggtctcctttgaagacggcaaaaagcacttcag

SEQ ID NO: 32918 - DNA, 260 bp, Unknown
  Description of Unknown: RightRegion for integrase B6919 sequence
atagttgtagatgaaaaaaatatgaaaatactgctaacgtacaatgaaagtcccttttgaaattaggtggtccaaacggggaacttggtgcttgcttaagatatctttgtcaaagatttactatgcctgatgaaaaaggaagaacactactttcagatattggttgtgaagaaattggccattgtgaaatgatatcttctatgatgtatcaacttatgcgaggcgctagtattgaagaaataaaaagtgctggcttaaat

SEQ ID NO: 32919 - DNA, 260 bp, Unknown
  Description of Unknown: RightRegion for integrase B6920 sequence
cttgactggggaaaaggcaggtacgggaaaaaggacattaaagacatcacttttttttgaccgctgtatgttcttaattactgcacctaatggcgcgggcaagagcaccttggttaagctcatgacgggcatcctgacgccgacaagcggcagctgcacggtggatgggcgcacgccgtgggcggagcggaaggcacatgtgcgcagcctcggcgcagtgttcgggcagcggatgcagctctggtgggacgtgccgattc

SEQ ID NO: 32920 - DNA, 140 bp, Unknown
  Description of Unknown: RightRegion for integrase B6921 sequence
aacggcgattgtgaccttgaagtaggcgtacatatgaatggttgcgggagccagatttgaactgacgaccttcgggttatgagcagctctaacgcaagtgaaaaatcccatgcaacacaatcattttcagacttcatata

SEQ ID NO: 32921 - DNA, 260 bp, Unknown
  Description of Unknown: RightRegion for integrase B6922 sequence
aacggcgattgtgaccttgaagtaggcgtacatatgaatggttgcgggagccagatttgaactgacgaccttcgggttatgagatttataaagcactgcttttcgttctttttcataacgaaaaataaggaaaaacagttctttttcatgccatttctttgatatatatagtcattcataaagttttatgatttcataagggtatgcgtaagggtgcgaaataatgaactttttatatatgcaaaacagtttttgtgttg

SEQ ID NO: 32922 - DNA, 109 bp, Unknown
  Description of Unknown: RightRegion for integrase B6923 sequence
tcattgatagataagattttagtcaagaaaggttttattaaaatcctatggaaaatttagtctttctttaaaggtatttagatacaggcattgttacacgtgtaacaga

SEQ ID NO: 32923 - DNA, 260 bp, Unknown
  Description of Unknown: RightRegion for integrase B6924 sequence
gaaattcaagtggtctggacgaaggacaaaaaggagatcaaggacatcatatttttttgagattgtagttgtacataatttctgtaccgaatggcgcagaaattaaatacaaataaaacggcggcttcggtcgccgtttttctttgaaaaaatagttcttgataatccccgagctttttttattgacaaatccagaaaaaagcgcatcataatgacaaaatcgcaaaggggtgcttttatgggtttgttccgttttttgc

SEQ ID NO: 32924 - DNA, 260 bp, Unknown
  Description of Unknown: RightRegion for integrase B6925 sequence
accttgttttttgtaaaacactgtttcgggtttgttatgaatatagaggaggtaggttaaacgcctacctcctcttgttttgtttgtaagttattcttcttgttcttatacaagtagttaaagtagttgttctttggtttttgcgtgtaacttttgcatagtacgcgtgtatatagagaaagtttacgcaaaaaccgatttttaactactttaactactttaactactttaactactttaactactttacctgcggctgt

SEQ ID NO: 32925 - DNA, 260 bp, Unknown
  Description of Unknown: RightRegion for integrase B6926 sequence
accttgttttttgtaaaacactgtttcgggtttgttatgaatatagaggaggtaggttaaacgcctacctcctcttgttttgtttgtaagttattcttcttgttctcatacaagtagttaaagtagttgttctttggtttttgcgtgtaacttttgcatagtacgcgtgtatatagagaaagtttacgcaaaaaccgatttttaactactttaactactttacctgcgactgtttcagctccaagacagcggattcaatg

SEQ ID NO: 32926 - DNA, 260 bp, Unknown
  Description of Unknown: RightRegion for integrase B6927 sequence
tctttatttttcgtaaaacactgtttcggatttgttgtgcatatagaggaagtaggctaaacgcttgcttcctctttttgcgtcagcttcaattccagcacagccgcttcgataaggttttcgatttctgcggtgttgagggtgaagcctttgctgttcaaaaagtcaatgacgtactgcttcttttcttcacctctgccagcacccacataaatcatttcagccgcttccacggcaatgttcacccacatcataatgtt

SEQ ID NO: 32927 - DNA, 260 bp, Unknown
  Description of Unknown: RightRegion for integrase B6928 sequence
aaatgctgcttcgataaatcccgcatgcttctcaccgtttattataagcttaccttttgatatcttgatatccccttgatcttagtaatatggagtatggcccaccgtactccatcttactaatgttctatttcgcaatgtgctcatagtattccatgagctttttctccggccctgggccatccttatccagcagaaaagctttcgccagatctgcataaaactccgggcggtttacgccgtacctgacagctacgtcg

SEQ ID NO: 32928 - DNA, 260 bp, Unknown
  Description of Unknown: RightRegion for integrase B6929 sequence
gaaattcaggtggtctggtcgaaggataaaaaggagatcaaggacatcatatttttttgaaattgtagttgtacataatttctgtaccgaatggcgctgaaattaaatacaaacaaagcggcggcttcggtcgccgtttttctttgaaaaatagtccttgataatccccgggctttttttattgacaaatccagaaaaaagcgcatcataatggcaaaatcgcaaaggggtgcttttatgggtttgttccgctttttgca

SEQ ID NO: 32929 - DNA, 260 bp, Unknown
  Description of Unknown: RightRegion for integrase B6930 sequence
cgctgcaccttcgacaaatcccagatgctcctcgcgatctcttataaattcattttctgatgccttaattgtagcaagatggagtatggcccaccatactccatcttgctataatatttgaaatcactttctcagcacaaccccatgataataccccgccatcttcgcctccgggcctccggcatccttatccatgaggaacgcttttgcgaggtcggcgtagaactccggcctatcaaggccgtatttcgccgccacgg

SEQ ID NO: 32930 - DNA, 260 bp, Unknown
  Description of Unknown: RightRegion for integrase B6931 sequence
cgctgcacgttcgacaaatcccagatgctcctcgcgatctcttataaattcattttctgatactcttgattgtagcaagatggagtatggcccaccatattccatcttgctataatatttgaaatcactttctcagcacaatcccatgataataccccgccatcttcgcctccgctccgccggcgtccttatccatgaggaaggcttttgcaaggtcggcatagaattctggccggtcaaggccgtacttggcagccaca

SEQ ID NO: 32931 - DNA, 109 bp, Unknown
  Description of Unknown: RightRegion for integrase B6932 sequence
ctcgcaaaaatcatatatcacaagcctgcgcaatcccttgagctttatttctatgcgtaaggaggggcttaaatttcccgcttcacatccgcgcacttacaaattatat

SEQ ID NO: 32932 - DNA, 260 bp, Unknown
  Description of Unknown: RightRegion for integrase B6933 sequence
ggaattataaataaggttcaagtcacggctgataaagttgtcatcagatggaaagtataaagaattttagtgacctttatttctaccaaagtgaaagctttaaccttggctttttttaaatttgtcatgagttttttcattttaaaaatttacctccatattttgatacatgggcataagcattgccgcataaagtaaaacgataatcagggccacaaagataaaaaccagtggctgtactaagttcatggtgcggttga

SEQ ID NO: 32933 - DNA, 260 bp, Unknown
  Description of Unknown: RightRegion for integrase B6934 sequence
cgctgcacgttcgacaaatcccagatgctcctcgcgatctcttataaattcattttctgatactcttgattgtagcaagatggagtatggcccaccatactccatcttgctataatatttgaaatcactttctcagcacaattccatgataatacccggccatcttcgcctccggccctccggcatctttatccatgaggaacgctttggcgagatcagcgtaaaattccggccggtcaaggccgtacttggcagccaca

SEQ ID NO: 32934 - DNA, 260 bp, Unknown
  Description of Unknown: RightRegion for integrase B6935 sequence
accttgtttttcgtcaaacattgcttcggatttgttatgaacatagaggaggtaggctgattgtgcctacctcctcttgttgtatgaagttattgttcttgttcttggcgaagtagttaaagtagttgttcttgggtttttgcgtgtaacttttgcttagtatgcgcatatatagagaaagtttacgcaaaaaccgattttgaactacttttactacttctgctcggcctgtttcagctccaagacagcggactcaatga

SEQ ID NO: 32935 - DNA, 260 bp, Unknown
  Description of Unknown: RightRegion for integrase B6936 sequence
cgctgcaccttcgataagtcccaaatgctcctcgcgatctcttataaattcattttctgatactcttgattgtagcaagatggagtatggcccaccatactccatcttgctataatatttgaaatcactttctcagcacaattccatgataatacccggccatcttcgcctccgggcctccggcgtccttatccatgaggaaagctttggcgagatctgcgtaaaattctggccggtctaggccgtacttggcagctacg

SEQ ID NO: 32936 - DNA, 260 bp, Unknown
  Description of Unknown: RightRegion for integrase B6937 sequence
gagctgattgacaaggtacaagtcacatctgacaagatagtgatccgctggaaaatttgataaatttagttacgctatttcaaatcaaggtgtcttactctctcaaataatcgataattttactatcctacatttcaataagcgtaaaagcttttaccttatatgtttttaattttttcataaatgaacctccatattttgataaatcggcagcaacatggctgcgtaaagtaagacaatcacaagagccacaaagacaa

SEQ ID NO: 32937 - DNA, 260 bp, Unknown
  Description of Unknown: RightRegion for integrase B6938 sequence
atcagcaaaatcatatatgttaagccggaaaaccggcttgatattattttttatacttaaatcatctctttttgccgtcaagagggccggacggcgaattgggtgcgtcactgcgctacctttcccagcgctattctatgccgctgcccgaattaaaaggcctgctgacggatataggtgcagagcacacagaagcgcgcattttgctttcataagcgtttatttcctttacgccggcaagtatctgcacctgccatctg

SEQ ID NO: 32938 - DNA, 109 bp, Unknown
  Description of Unknown: RightRegion for integrase B6939 sequence
ctcgcaaaaatcatatatcacaagcctgcgcaatcccttgagctttatttctatgcgtaaggaggggcttaaaattcctgcttcacatccgcgcacttgaaaattatat

SEQ ID NO: 32939 - DNA, 260 bp, Unknown
  Description of Unknown: RightRegion for integrase B6940 sequence
accttgtttttcataaaacattgttttgggtttgtggtaaatatagaggaggtaggctgatttggcctacctcctcttgtcttgtaaacttattcttcttattcttatagaagtagttgaagtagtggttctttggtttttgcgtataacttttgcatagtacgcgcgtatatagagaaagtttacgcaaaaaccgattttgaactactttaactacttcatctgcgactgtttcagctccaagacagcggactcaatga

SEQ ID NO: 32940 - DNA, 260 bp, Unknown
  Description of Unknown: RightRegion for integrase B6941 sequence
ctaataaataaggtagaatatgatggagaaatcaataatttaaccatattttataactagtccctattgtaataaggtggtgctaacggcgagttagcagcagccttccgctatctaaatcaaagatatacaatgccagatgataaaggaaaagctttgcttaccgatattggaactgaagaactagcccatgttgaaatgatatccgctatgatatatcaactactaaatggcgccactctaaaagaattaaaagaagc

SEQ ID NO: 32941 - DNA, 260 bp, Unknown
  Description of Unknown: RightRegion for integrase B6942 sequence
cgctgcacgttcgacaaatcccagatgctcctcgcgatctcttataaattcattttctgatgcttttggttgtagtaagatggagtatggcccaccatactccatcttgctataatatttgaaatcactttctcagcacaattccatgataatacccggccatcttcgcctccggcccgccggcgtccttatccatgaggaacgctttggcgaggtcggcgtagaactccggccggtcgaggccgtacttggcagctacg

SEQ ID NO: 32942 - DNA, 260 bp, Unknown
  Description of Unknown: RightRegion for integrase B6943 sequence
cgctgcaccttcgacaaatcccagatgctcctcgcgatctcttataaattcattttctgatgccttgattatagcaagatggagtatggcccaccatactccatcttgctataatatttgaaatcactttctcagcacaattccatgataatacccggccatcttcgcctccggcccgccggcgtccttatccatgaggaacgctttggcgaggtcggcgtagaactccggccggtcgaggccgtacttggcagctacgc

SEQ ID NO: 32943 - DNA, 260 bp, Unknown
  Description of Unknown: RightRegion for integrase B6944 sequence
ctcgcaaaaatcatatatcacaagcctgcgcaatcccttgagctttatttctatgcgtaaggagtttctcgcttcacatccacgcacttacaaattatatctaaatacagtacagaccgccgtattgcgaaattataaggcttgcggcctgaggatcgcagtgctttatatttatgggatattgcaattttttaacataattaaacatagcttttctcctttcattattcaattcattttatgcaaagaagaaaatattg

SEQ ID NO: 32944 - DNA, 260 bp, Unknown
  Description of Unknown: RightRegion for integrase B6945 sequence
gaaattcaggtggtctggtcgaaggataaaaaggagatcaaggacatcatatttttttgaaattgtagttgtatataatttctgtaccgaagggtgataagaaaaccaaacacttgattccgactcataagggtacggctctggtaacagtcatgccggaacagattcagtccccctccatgacggcggattgggaagaaaaattgttactcattgaaaaaggcgaatatgccagcgaggattttatggatgagatcaaa

SEQ ID NO: 32945 - DNA, 260 bp, Unknown
  Description of Unknown: RightRegion for integrase B6946 sequence
cgctgcaccttcgacaaatcccagatgctcctcgcgatctcttataaattcattttctgatgctctttattgtagcaagatggagtatggcccaccatactccatcttgctataataattgaaatcactttctcagcacaaccccatgataatacccggccatcttcgcctccggccctccggcgtccttatccatcaagaacgctttggcgaggtcggcgtagaactccggcctatcaaggccgtatttcgacgccacg

SEQ ID NO: 32946 - DNA, 260 bp, Unknown
  Description of Unknown: RightRegion for integrase B6947 sequence
cgctgcacgttcgacaaatcccagatgctcctcgcgatctcttataaattcattttctgatgccttaattgtagcaagatggagtatggcccaccatactccatcttgctataataattaaaatcactttctcagcacaatcccatgataatacccggccattttttcctccgggcctccggcatccttgtccatcaggaacgctttggcgaggtcggcgtaaaattccggccggtcaaggccgtatttcgccgccacgg

SEQ ID NO: 32947 - DNA, 260 bp, Unknown
  Description of Unknown: RightRegion for integrase B6948 sequence
gaaattcaggtggtttggtcgaaggataaaaaggagatcaaggacatcatatttttttgagattgtagttgtacataatttctgtaccgaacggcgcagcaattaaacacaaacacaataaacataaaaaagagccggggatcactccccggctttttcgtgttccaagtctgccagcctgtggttgatcaccttgatctgttcctccactaccggaattcgttgggcgaaattgttgtgcgccctcacttcccgcgtca

SEQ ID NO: 32948 - DNA, 260 bp, Unknown; identical to SEQ ID NO: 32935
  Description of Unknown: RightRegion for integrase B6949 sequence

SEQ ID NO: 32949 - DNA, 260 bp, Unknown
  Description of Unknown: RightRegion for integrase B6950 sequence
cgctgcaccttcgacaaatcccagatgctcctcgcgatctcttataaattcattttctgatactctctattgtagcaagatggagtatggcccaccatactccatcttgctacaatatttgaaatcactttctcagcacaaccccatgataatacccggccatcttcgcctccgggcctccggcgtccttatccatgaggaaggcttttgcaaggtcggcatagaattctggccggtcaaggccgtacttggcagctacg

SEQ ID NO: 32950 - DNA, 109 bp, Unknown
  Description of Unknown: RightRegion for integrase B6951 sequence
ctcgcaaaaatcatatatcataagcctgcgcaatcccttgaactttatttctatgcgtaatgtccccgggcttaaaatcctcgcttcacatccgcacgcttgaaaacta

SEQ ID NO: 32951 - DNA, 260 bp, Unknown
  Description of Unknown: RightRegion for integrase B6952 sequence
gttcgtacaaaatgcaaatggtgcccccagcgggattcgaacccgcgatatccaccttgaaagagctgcaccctaacgtgcaagcagataatggcagttcaaaggcgaacgtcttaactggggttttaatgcaacgcgatacaaagcgccgcaaagtagtacactgcattttgcggcggttttgcggcgcattttgcggcgcggcgagtgaacggagataccgcgatgcactacacgagcgtacggattagggaacgcaa

SEQ ID NO: 32952 - DNA, 260 bp, Unknown
  Description of Unknown: RightRegion for integrase B6953 sequence
gggcttataaacaaggttcaggtaacagctgaggacattgttatcaattggaaaatataactaattttactaaccttcatttcaaagagcgtggctctgctagccttgaggaaaacccttatatttggcagttggagaaaatgaatgagatggggctactcaatgatgataatgtcaagctcatttctgatcgttcaggcattgctgaggagcaacttagacatgttatccaaaatgagggctataaggtctataaagac

SEQ ID NO: 32953 - DNA, 109 bp, Unknown
  Description of Unknown: RightRegion for integrase B6954 sequence
tcattgatagataagattttagtcaagaaaggttttattaaaatcctatggaaaatttagtctttctttagaggtatttggatacaggcattgttacacgtgtaacaga

SEQ ID NO: 32954 - DNA, 260 bp, Unknown
  Description of Unknown: RightRegion for integrase B6955 sequence
cgctgcaccttcgacaaatcccagatgctcctcgcgatctcttataaattcattttctgatgccttgattgtagcaagatggagtatggcccaccatactccatcttgctataatatttgaaatcactttctcagcacaattccatgataatacccggccatcttcgcctccggcccgccggcgtccttatccatgaggaacgctttggcgaggtcggcgtagaactccggccggtcgaggccgtacttggcagctacgc

SEQ ID NO: 32955 - DNA, 260 bp, Unknown
  Description of Unknown: RightRegion for integrase B6956 sequence
accttgttttttgtaaaacactgtttcgggtttgttatgaatatagaggaggtaggttaaacgcccacctcctcttgttttgtttgtaagttattcttcttgttcttatacaagtagttaaagtagttgttctttggtttttgcgtgtaacttttgcatagtacgtgcgtatatagagaaagtttacgcaaaaaccgattttgaactactttaactactttacctgcgactgtttcagctccaagacagcggattcaatg

SEQ ID NO: 32956 - DNA, 260 bp, Unknown
  Description of Unknown: RightRegion for integrase B6957 sequence
ctaataaacaaggtagaatatgaagaaaaaaccaataatttggtcatattttataattagtccctattacaatacggtggtgcaaatggagagttaggagctgctttaagatatttaaatcaaagatatacgatgcccgatgaaagaggaaaggctttgcttactgatattggaaccgaggaattgacacaataagtttatcataaataaaagccacaagtaaaatagagcaaaaaaaaagaaaggtaaccgacaattat

SEQ ID NO: 32957 - DNA, 260 bp, Unknown
  Description of Unknown: RightRegion for integrase B6958 sequence
ttattccccatcgggaatgcgttcggatttttcatttttatcaaggatatttcctactgatgtttatccccggaggattttttatcctccgggtttttcttttatttgcacattcgattcctgaccgctctcctgctacaatgattgcagaaaatcattaggaggacggaacaatgaaaaaattcatcacagacgaaaggacagacttgcactatgagcttgtcggggactactaccttatcgccggggaggacgagccg

SEQ ID NO: 32958 - DNA, 260 bp, Unknown
  Description of Unknown: RightRegion for integrase B6959 sequence
attgcaaaaatcgtatatcataagctggcgcaatcccttgagctttatttctatgcgtaaggagtttcccgcttcacatccgcgcacttacaaattatatctaaatgcagtacagtccgccgtattgagaaattataaggcttgcggcctgaggatcgcagtgctttatatttatgggatattgcaattttttaacataattaaacatagcttttctcctttcattattcaattcattttatgcaaagaagaaaatattg

SEQ ID NO: 32959 - DNA, 260 bp, Unknown
  Description of Unknown: RightRegion for integrase B6960 sequence
gggcttataaacaaggttcaggtaacagctgaggacattgttatcaagtggaaaatatagataattttagtaacctacatttccacaagcgtgaaagctttaaccttagcttttttcaagaatgtcatcatttttttcattttaaaaatttacctccatattttgatacatgggcataagcattgccgcataaagtaaaacaataatcagagccacaaagataaagaccagtggctgcaccagattcatggcgcggttaa

SEQ ID NO: 32960 - DNA, 260 bp, Unknown
  Description of Unknown: RightRegion for integrase B6961 sequence
cgctgcaccttcgacaaatcccagatgctcctcgcgatctcttataaattcattttctgatgccttaattgtagcaagatggagtatggcccaccatactccatcttgctataataattgaaatcactttctcagcacaaccccatgataatacccggccatcttcgcctccgggcctccggcgtccttgtccatcaggaacgctttggcgaggtcggcgtagaactccggccggtcgaggccgtacttggcagctacgc

SEQ ID NO: 32961 - DNA, 260 bp, Unknown
  Description of Unknown: RightRegion for integrase B6962 sequence
tcattgatagataagattttagtcaagaaaggttttattaaaatcctatggaaaatttagtctttctttagaggtatttagatacaggtattgttacacgtgtaacagatttctcatttgacgtcgtcacaagctcaggctgcgccgtcaaacgaccaatcataataactttattgtacatcattacctccttatcttattattcgaaaaagaatctagaaaacagtaaattaatgtagcaaaaaagtcctagtttccta

SEQ ID NO: 32962 - DNA, 260 bp, Unknown
  Description of Unknown: RightRegion for integrase B6963 sequence
ttaataaacaaggtcgagtatgacccaacctctaacactttagagttatattataactaatgtcccttttgtgatacggtggttctaatggagagctagcagctgctcttcgttatttaaatcaaagatatactatgcctgataatcggggaaaagctttacttactgatattgggacagaagaacttgctcatgtagagatgattgcgactatggtttatcagctaacaaaagatgcaacacctgaagagatgaagcaa

SEQ ID NO: 32963 - DNA, 174 bp, Unknown
  Description of Unknown: RightRegion for integrase B6964 sequence
gagctgattgacaaggtgcaagtcacttctgacaagatagtgatacgctggaaaatttgataaatttggttacgctattttcaataagtgtaaaggcctttaccttataggtttttaattttttcataaatgaacctccatattttgataaatcggcagcaacatggctgcata

SEQ ID NO: 32964 - DNA, 260 bp, Unknown
  Description of Unknown: RightRegion for integrase B6965 sequence
gtaaaaaagattatttatgatagacaaaatggggaatttaaggtaatatactatgtatagagaaaccctcaggaagccgcataaacaaaggctttctgagggttttataggtttttgcagtccgggccaccatactgactcataatatactgtgcgatctttggattcggctgcgtaatttttaccgggtactgcaggcgtttttcatatttccacatgtgcagattcctccttcccatggccatgcgctgttgatccag

SEQ ID NO: 32965 - DNA, 260 bp, Unknown
  Description of Unknown: RightRegion for integrase B6966 sequence
accttgttttttgtaaaacactgtttcgggtttgttatgaatatagaggaggtaggttaaacgcctacctcctcttgttttgtttgtaagttattcttcttgttcttatacaagtagttaaagtagttgttctttggtttttgcgtgtaacttttgcatagtacgtgcgtatatagagaaagtttacgcaaaaaccgattttgaactactttaactactttacctgcgactgtttcagctccaagacagcggattcaatg

SEQ ID NO: 32966 - DNA, 260 bp, Unknown
  Description of Unknown: RightRegion for integrase B6967 sequence
cgctgcacgttcgacaaatcccagatgctcctcgcgatctcttataaattcattttctgataccttgattgtagcaagatggagtatggcccaccatactccatcttgctataatatttgaaatcactttctcagcacaaccccatgataatacccagccattttttcttccggccctccggcgtccttatccatgaggaaggcttttgcaaggtcggcatagaattccggcctatcaaggccgtatttcgccgcgacgg

SEQ ID NO: 32967 - DNA, 260 bp, Unknown
  Description of Unknown: RightRegion for integrase B6968 sequence
tctttatttttcgtaaaacactgtttcggatttgttgtgcatatagaggaagtaggctaaacgcttgcttcctctttttgcgtcagcttcaattccagcacagccgcttcgataaggttttcaatttctgcggtattgagggtgaagcctttgctgttcaaaaagtcaatgacgtactgcttcttttcttcacctctgccagcacccacataaatcatttcagccgcttccacggcaatgttcacccacatcataatgtt

SEQ ID NO: 32968 - DNA, 260 bp, Unknown
  Description of Unknown: RightRegion for integrase B6969 sequence
gttcgtacaaaatgcaaatggtgcccccgggcggattcgaaccgtcgacacccgctttaggagatatgatttaatgctaccccctaccattcatcaagcatcattgaatatcatataaccgcagataaacatagcagtttgtgtcttttgcctccggtagctgcgcctacgcttttacaaacatattactaacagctttagctaaactgcactcaatgaattgttgaaaactattcaaagaaacggagcgcaaagatgtc

SEQ ID NO: 32969 - DNA, 260 bp, Unknown
  Description of Unknown: RightRegion for integrase B6970 sequence
accttgtttttcgtaaaacactgtttcgggtttgttatgaacatagaggaggtaggctgattatgcctacctcctcttgttgtgtgaagttattgttcttgttcttggcgaagtagttaaagtagttgttcttgggtttttgcgtgtaacttttgcttagtatgcgcatatatagagaaagtttacgcaaaaaccgattttgaactacttttactacttctgctcggcctgtttcagctccaagacagcggactcaatga

SEQ ID NO: 32970 - DNA, 260 bp, Unknown
  Description of Unknown: RightRegion for integrase B6971 sequence
gtggtctacctgtccgatgatcacctgcggattgctttcaattattcagggggggtctaacgccgaggccgacttcgaccttgtcatggacgcggaggcggcggctggcgaactgtccaaaaagttcgcacaaggtcacgttgcctccaccaacataaaagccacctgaaaacttacgtttttcaggtggcttttgctatatctgctattctgttacgccagatccggcaggatatccgaccacagagcctgctcctgcc

SEQ ID NO: 32971 - DNA, 109 bp, Unknown
  Description of Unknown: RightRegion for integrase B6972 sequence
gtgaaaaagattgtgttggataaggaaaagggagaatttaaggttgtttactacgcatagaaaagccccggaaaccgcataaataaaggctttccggggttattatgag

SEQ ID NO: 32972 - DNA, 260 bp, Unknown; identical to SEQ ID NO: 31098
  Description of Unknown: RightRegion for integrase B6973 sequence

SEQ ID NO: 32973 - DNA, 109 bp, Unknown
  Description of Unknown: RightRegion for integrase B6974 sequence
ctcgcaaaaatcatatatcacaagcctgcgcaatcccttgagctttatttctatgcgtaaggagtttcccgcttcacatccgcgcgcttgaaaatcatatttaaatgca

SEQ ID NO: 32974 - DNA, 260 bp, Unknown
  Description of Unknown: RightRegion for integrase B6975 sequence
cgctgcacgttcgacaaatcccagatgctcctcgcgatctcttataaattcattttctgatgctctctattgtagcaagatggagtatggcccaccatactccatcttgctataatatttgaaatcactttctcagcacaattccatgataatacccggccatcttcgcctccgggcctccggcgtccttatccatgaggaaagctttggcgagatctgcgtaaaattctggccggtctaggccgtacttggcagctacg

SEQ ID NO: 32975 - DNA, 109 bp, Unknown
  Description of Unknown: RightRegion for integrase B6976 sequence
aagatagttttcaataaaaaagaggaaaaattcactctttactattttatcaattactagaacccctttatttatcggggtttgagctgttacacgttcttgcagtatg

SEQ ID NO: 32976 - DNA, 109 bp, Unknown
  Description of Unknown: RightRegion for integrase B6977 sequence
gccttgataagcaaggttagagttactagtgaatccatcgttattttgtggaagttatagggagttttagttacattcatttcaatcagtgtaaaagctcgtagtttaa

SEQ ID NO: 32977 - DNA, 168 bp, Unknown
  Description of Unknown: RightRegion for integrase B6978 sequence
gccttgataagcaaggttcgagtgactagtgaaaccatcgttattttatggaaattatagagcgttttagttacatttatttcaatcagcgtaaaagcacgtaatttaacggccttcaattttttcaacatcattttcatgacatcattccttccatattttgataca

SEQ ID NO: 32978 - DNA, 109 bp, Unknown
  Description of Unknown: RightRegion for integrase B6979 sequence
gccttgataagcaaggttagagtgactagtgaaaccatcgttattttatggaaattatagagcgttttagtaacattcatttcaatcaacgtaaaagcacgtaatttaa

SEQ ID NO: 32979 - DNA, 260 bp, Unknown
  Description of Unknown: RightRegion for integrase B6980 sequence
gttttttttatgatcttgtttctactaactatgcaccgcctgtcggtactgcgtagttagtagaaacgatttttttgtgcagttttgcttttctctggctccgatcggggcgcgatctggactttgcaaaaggcaaattgcacaaaaaagagggccgaacagggaactactccctgcccggtcctcttttactttctcatcttatttcttcagataactctttgaactgaatccgatgtactcaacaccgtcgatagtga

SEQ ID NO: 32980 - DNA, 109 bp, Unknown
  Description of Unknown: RightRegion for integrase B6981 sequence
gccttgataagcaaggttcgtgtcactagtgaaaccatcgttattttatggaaattatagagcgttttactaacctttatttcaatcagcgtaaaagcacgtaatttaa

SEQ ID NO: 32981 - DNA, 260 bp, Unknown
  Description of Unknown: RightRegion for integrase B6982 sequence
gccttgataagcaaggccagagttactagtgaaaccatcgttattttatggaaattatagagcgttttagttacattcatttcaattagcgtaaaagctcgtagttttacggcattcaatttttttaacatcattttcatgacatcattccttccatattttgatacattggtaatagcatggctgcatagatcattacaatcacgacagcaacaataacaaaaatgaggggttgcacaaaggttgttgccttattaaga

SEQ ID NO: 32982 - DNA, 260 bp, Unknown
  Description of Unknown: RightRegion for integrase B6983 sequence
aagatagttttcaataaaaaagaggaaaaattcactctttactattttatcaattactagaacccctttatttatcggggtttgagccgttacacgttcttgcagtatgggggtcctgacggagaatcagcggccgcaatgcgttatatgtcacagaaatttgcaatgaaaaaccctaaagttgcaggtttaatcaacgatattgcggtggaagaacttgggcatctcgaaatggtcggctccattgtttcccagcttgt

SEQ ID NO: 32983 - DNA, 73 bp, Unknown
  Description of Unknown: RightRegion for integrase B6984 sequence
gttcgcacattttcgggttggtgcccccagcgggattcgaacccgcgatatccaccttgaaagggtggcgtcc

SEQ ID NO: 32984 - DNA, 260 bp, Unknown
  Description of Unknown: RightRegion for integrase B6985 sequence
gctctggtgaataagatagtgataaccgaggggggattcgaagttgattggaaattttgagcaagtttatacgaattgtgggtatggatgaatccctgcccacaagttgcataaaaaataagcccccggccaggaggaatcctgaaccgggggctttcgtcatacattattcagttttcgccgcgcccagcgcttgcagcttcttcacaagatcggatacatagttcgcgccgcgactggcaaaaacgcccgtgagcgca

SEQ ID NO: 32985 - DNA, 260 bp, Unknown
  Description of Unknown: RightRegion for integrase B6986 sequence
tttgatacaatgtgtatcagggttgcggtgctttttcttgctcttttcagaataatctgatagtataaagtaaatctggtattcaggagacggatatgaaaaatcaacgcattttattgccctatttatacgcccttatcaccattgtctgtaccttcctggtaggtcagcttatcctgtggtttgtaccggacaacacgaatatctgggcttccgtgctgttcattttcatgaatctgctgccgatgctggttgccttt

SEQ ID NO: 32986 - DNA, 109 bp, Unknown
  Description of Unknown: RightRegion for integrase B6987 sequence
gcactaattaccaaggtgaaagtgacagcagaaagtatcatcatcaaatggaaaatataaagaattttactatctttcatttctataagcgtaaaagcccgtacactga

SEQ ID NO: 32987 - DNA, 260 bp, Unknown
  Description of Unknown: RightRegion for integrase B6988 sequence
aagatagttttcaataaaaaagaggaaaaattcactctttactattttatcaattactagaacccctttatttatcggggtttgagccgttatacgttcttgcagtatgggggtcctgacggagaagcaggggccgcaatgcgttatatgtcacagaaatttgcaatgaaaaaccctaaagttgcaggtttaatcaacgatattgcggtggaagaacttgggcatctcgaaatggtcggctccattgtttcccagcttgt

SEQ ID NO: 32988 - DNA, 109 bp, Unknown
  Description of Unknown: RightRegion for integrase B6989 sequence
gccttgataagcaaggttaaagttactagtaaatccatcgttattttatggaaattatagagcgttttgctatccttcatttcaatcagcgtaaaagcacgtaatttaa

SEQ ID NO: 32989 - DNA, 260 bp, Unknown
  Description of Unknown: RightRegion for integrase B6990 sequence
agtttaattaatagaattgaggtaacaccggatgaaactcgtatttactggcgtttttaacgctaaaaatttttaaatcaaaaaacccaaaaaggtgtagtagtcgcgttgacgataacaacatatttttgggacacctggagactaataagtctccttttttttatatttacggtttataaattggccgaggcgttaggagtaaaggtcgaggatcttctcgagaaataaaaaaaaggaccgaggataaactcctcggt

SEQ ID NO: 32990 - DNA, 260 bp, Unknown
  Description of Unknown: RightRegion for integrase B6991 sequence
gccttgataagcaaggttagggttactagtgaatccatcattattttgtggaaattatagagcgttttagtaacattcatttcaatcagcgtaaaagcacgtaatttaacggcattcaattttttcaacatcattttcatgacatcattccttccatattttgatacattggtaatagcatagctgcatagatcattacaatcacgacagcaacaataacaaaaatgaggggttgcacaaaggttgttgccttattaaga

SEQ ID NO: 32991 - DNA, 109 bp, Unknown
  Description of Unknown: RightRegion for integrase B6992 sequence
gccttaataagcaaggttagagtgactagtgaaaccatcgttattttatggaaattatagagagttttagttacattcatttcaatcagcgtaaaagcacgtaatttaa

SEQ ID NO: 32992 - DNA, 109 bp, Unknown
  Description of Unknown: RightRegion for integrase B6993 sequence
aagatagttttcaataaaaaagaggaaaaattcactctttactattttatcaattactagaacccctttatttatcggggtttgagccgttatacgttcttgcagtatg

SEQ ID NO: 32993 - DNA, 260 bp, Unknown
  Description of Unknown: RightRegion for integrase B6994 sequence
gccttgataagcaaggttagagttactagtgaatccatcgttattttatggaaattatagagcgttttactaacctttatttcaatgaatgacactaaaattcttgatttgagcataaaaaaagacttggcagctcacgctaccaagcgacaatagaaaaaaacaaaaacattctgcacgtaatcgtccaaaagtacatctatagtgtacctctatttagattaaatgtctaacgttatatacaaaataaaaaccccgac

SEQ ID NO: 32994 - DNA, 260 bp, Unknown
  Description of Unknown: RightRegion for integrase B6995 sequence
tccttgataaacaaggttagagttactagtgaaaccatcattattttatggaaattatagagagttttagtgaccttcatttcaatcaaggacactaaaattctttattcgagcaaaaaaaacttggcagcatcggctaccaagcgacatgaaaaaaacaaaaacattgaacgtaaaagtacatctatagtgtacctctatttattttgattgtctaatgctttgtatgcaatacacaaaaaaagactagggttctccta

SEQ ID NO: 32995 - DNA, 260 bp, Unknown
  Description of Unknown: RightRegion for integrase B6996 sequence
gccttgataagcaaggttagggttactagtgaatccatcgttattttgtggaaattatagagagttttggttaccttcatttcaatcaaagtaaaagctcgtagtttaacggcattcaatttttttaacatcattttcatgacatcattccttccatattttgatacattggtaatagcatagctgcatagatcattacaatcacgacagcaacaataacaaaaatgaggggttgcacaaaggttgttgccttattaaga

SEQ ID NO: 32996 - DNA, 260 bp, Unknown
  Description of Unknown: RightRegion for integrase B6997 sequence
gccttgataagcaaggttcgagttactagtgaaagtatcgttattttatggaaattatagagcgttttgctatccttcatttcaatcagcgtaaaagcacgtaatttaacggcattcaattttttcaacatcattttcatgacatcattccttccatattttgatacattggtaatagcatagctgcataaatcattacaatcacgacagcaacaataacaaaaatgaggggttgcacaaaggttgttgccttattaaga

SEQ ID NO: 32997 - DNA, 109 bp, Unknown
  Description of Unknown: RightRegion for integrase B6998 sequence
gccttgataagcaaggttagagttactagtgaatccatcgttattttatggaaattatagagcgttttactaacctttatttcaattagcgtaaaagctcgtagtttaa

SEQ ID NO: 32998 - DNA, 109 bp, Unknown
  Description of Unknown: RightRegion for integrase B6999 sequence
gccttgataagcaaggttcgagttactagtgaaagtatcgttattttatggaaattatagagcgttttgctatccttcatttcaatcaacgtaaaagcacgtaatttaa

SEQ ID NO: 32999 - DNA, 260 bp, Unknown
  Description of Unknown: RightRegion for integrase B7000 sequence
aagatagttttcaataaaaaagaggaaaaattcactctttactattttatcaattactagaacccctttatttatcggggtttgagccgttatacgttcttgcagtatgggggtcctgacggagaagcaggggccgcaatgcgttatatgtcacagaaatttgcaatgaaaaaccctaaagttgcaggtttaatcaacgatattgcggtggaagaactcgtagtttaactatatcattagcataaaggggactattttag

SEQ ID NO: 33000 - DNA, 260 bp, Unknown
  Description of Unknown: RightRegion for integrase B7001 sequence
gtggatcacatcacatattttaaagaatttcaagctgtagatattgtgtatagaacatgatcgcttttagcattaaggtcctccatatttcaaaagtagatagtagccaatcttttacaggttggctacttttttattggcggcatggtgctaaactctgcggaaatctatatcatgtataattttataggaggtgatgagatgccgagagcaaatgcgattgattggtcacaaattaaagcacggtatgtggccggtga

SEQ ID NO: 33001 - DNA, 260 bp, Unknown
  Description of Unknown: RightRegion for integrase B7002 sequence
gctctggtgaataagatagtgataaccgatggtggattcgaagttgattggaaattttgaacaaatttatatgaattgtgagtatggatgaatccctgcccatgcggctattttgggcaccccacccgcgcgtgcagctgcacgccctatgccattgagcgctatctgcagcgcgtttccggtccgctgctggacgctatcggtcacgcactgacattcgtaaaattttcggtgttttctccccctttatttctgtgttt

SEQ ID NO: 33002 - DNA, 109 bp, Unknown
  Description of Unknown: RightRegion for integrase B7003 sequence
aaaatattagtttatccagataagctagaaattcactggaagtttgcgattaatcagtaaatttaatatatttcatttcaaccaatgtaaagccttttttgacacgcca

SEQ ID NO: 33003 - DNA, 109 bp, Unknown; identical to SEQ ID NO: 32998
  Description of Unknown: RightRegion for integrase B7004 sequence

SEQ ID NO: 33004 - DNA, 260 bp, Unknown
  Description of Unknown: RightRegion for integrase B7005 sequence
gcattgataagcaaggttagagtgactagtgaaaccatcgttattttatggaaattatagagcgttttagttacattcatttcaatcaaggacactaaaattcttgatttgagcataaaaaagacttggcaacgaaggctaccaagtgatacggaaaagcaactattagactttgctaaagggcaagtctgagtacatctatagtgtacctctatttgaattaaatgtctaacgttatatcaatgatacacaaaaaaagg

SEQ ID NO: 33005 - DNA, 260 bp, Unknown
  Description of Unknown: RightRegion for integrase B7006 sequence
aacttgttcctaatcagggatgggttcggatttgtcttttatctggaagataccatttgacgcaaaaggtcatcccgccgagggatgaccttttgctttcggatattgaaaatatttgaaaaccagagtaaaatacaattacatatctgtactgccctatatacaatcattgtgtcggaggtaaagagagaatatgcagaagaaaagaatcttgtccgcagtcatcgcggcagcattgagcgcgactatgacagtacccg

SEQ ID NO: 33006 - DNA, 260 bp, Unknown
  Description of Unknown: RightRegion for integrase B7007 sequence
gctctggtgaataagatagtgataaccgaggggggattcgaagttgattggaaattttgagcaagtttatacgaattgtgggtatggatgaatccctgcccatgcggctattttgggcaccccacccgcgcgtgcagctgcacgccctatgccattgagcgctatctgcagcgcgtttccggtccgctgctggacgctatcggtcacgcgctgacattcgtaaaattttcagtgttttcgccccctttattcctgtgttt

SEQ ID NO: 33007 - DNA, 109 bp, Unknown; identical to SEQ ID NO: 32992
  Description of Unknown: RightRegion for integrase B7008 sequence

SEQ ID NO: 33008 - DNA, 181 bp, Unknown
  Description of Unknown: RightRegion for integrase B7009 sequence
gcattgataagcaaggttcgagtgactagtgaaaccatcgttattttatggaaattatagagagttttagttacattcatttcaatcagcgtaaaagcacgtaatttaacggcattcaattttttcaacatcattttcatgacatcattccttccatattttgatacattggtaatagcat

SEQ ID NO: 33009 - DNA, 109 bp, Unknown
  Description of Unknown: RightRegion for integrase B7010 sequence
ataaaaaatatcgttgtatatcctgaaagaatggaagttcactgggtatttgaaaaataaacagatttactatctatgatttcgataatcgtaaaggctgaatgttgct

SEQ ID NO: 33010 - DNA, 260 bp, Unknown
  Description of Unknown: RightRegion for integrase B7011 sequence
tccttaattaacaaggttcaagttacagttgataagattgtcatcaaatggaaaatataagagttttactatccttgatttcaatgctggtttctaaaattgttgattgttcccaaagaaaaaactcttgcattatgcaagagtagacacaaactttaaacaatctatcaaatgagccttcgctctacttcgattatacgcaatttattgaccgatagcctaccacggtctgagccacaaggagcgaccctgtaacttcc

SEQ ID NO: 33011 - DNA, 109 bp, Unknown
  Description of Unknown: RightRegion for integrase B7012 sequence
gccttgataagcaaggttcgagttactagtgaaaccatcgttattttatggaaattatagggagttttagttacatttatttcaatcagcgtaaaagcacgtaatttta

SEQ ID NO: 33012 - DNA, 181 bp, Unknown
  Description of Unknown: RightRegion for integrase B7013 sequence
gccttgataagcaaggttcgagtgactagtgaaactatcgttattttatggaaattatagagcgttttgctatccttcatttcaatcaacgtaaaagcacgtaatttaacggcattcaattttttcaacatcattttcatgacatcattccttccatattttgatacattggtaatagcat

SEQ ID NO: 33013 - DNA, 260 bp, Unknown
  Description of Unknown: RightRegion for integrase B7014 sequence
aagatagttttcaataaaaaagaggaaaaattcactctttactattttatcaattactagaaatcctttatttatcagggtttgagctgttacacgttcttgcagtatgggggtcctgacggagaagcaggggccgcaatgcgttatatgtcacagaaatttgcaatgaaaaaccctaaagttgcaggtttaatcaacgatattgcggtggaagaactcgtagtttaactatatcattagcataaaggggactattttag

SEQ ID NO: 33014 - DNA, 260 bp, Unknown
  Description of Unknown: RightRegion for integrase B7015 sequence
gccttaataagcaaggttagagtgactagtgaaaccatcgttattttatggaaattatagagagttttagttacattcatttcaatcagcgtaaaagcacgtaatttaacggcattcaattttttcaacatcattttcatgacatcattccttccatattttgatacattggtaatagcatagctgcatagatcattacaatcacgacagcaacaataacaaaaatgaggggttgcacaaaggttgttgccttattaaga

SEQ ID NO: 33015 - DNA, 109 bp, Unknown
  Description of Unknown: RightRegion for integrase B7016 sequence
gcattgataagtaaagttagggttactagtgaatccatcgttattttatggaaattatagagagttttagttacatccatttcaatcagagtaaaagcacgtaacttaa

SEQ ID NO: 33016 - DNA, 109 bp, Unknown
  Description of Unknown: RightRegion for integrase B7017 sequence
gccttgataagtaaggttagggttactagtgaatccatcgttattttatggaaattatagagagttttagttacatccatttcaatcagagtaaaagcacgtaacttaa

SEQ ID NO: 33017 - DNA, 260 bp, Unknown
  Description of Unknown: RightRegion for integrase B7018 sequence
aacaccttatttttcgtaaagcattgcttcggatttgttttgatagtagaggaagtctgatttcggtcaggcttccttcttttctgtggcgagtttcagctcaaggacagcggcttcgataatattgtcgatctcggcggtgtcgagatggaaacccttgctgttcagaaattcaaccacataggctttcttttcctcaccacggcctgtgccgacatagatcatttctgccgcttccacggcgatgttcacccaaaact

SEQ ID NO: 33018 - DNA, 109 bp, Unknown
  Description of Unknown: RightRegion for integrase B7019 sequence
aaaatattagtttatccagataagctagaaattcactggaagtttgcgaataatcagtaaatttaatatacttcatttcaaccaatgtaaagccttttttgacacgcca

SEQ ID NO: 33019 - DNA, 87 bp, Unknown
  Description of Unknown: RightRegion for integrase B7020 sequence
gccttgataagcaaggttagggttactagtgaatccatcgttattttgtggaaattatagggaattttactatccttcatttcaatc

SEQ ID NO: 33020 - DNA, 144 bp, Unknown
  Description of Unknown: RightRegion for integrase B7021 sequence
gccttgataagcaaggttagagttactagtgaatccatcgttattttatggaaattatagagcgttttgctatccttcatttcaatcaacgtaaaagcacgtaatttaacggcattcaattttttcaacatcattttcatgaca

SEQ ID NO: 33021 - DNA, 260 bp, Unknown
  Description of Unknown: RightRegion for integrase B7022 sequence
gccttgataagcaaggttagggttactagtgaatccatcgttattttgtggaaattatagagcgttttagtaaccttcatttcaatcagcgtaaaagcacgtaatttaacggcattcaattttttcaacatcattttcatgacatcattccttccatattttgatacattggtaatagcatagctgcatagatcattacaatcacgacagcaacaataacaaaaatgaggggttgcacaaaggttgttgccttattaaga

SEQ ID NO: 33022 - DNA, 260 bp, Unknown
  Description of Unknown: RightRegion for integrase B7023 sequence
aaaatcgaagtcagccccagcaagatgaaaattcattggcgttttaatgtcgaaaaataattttaggttccttgatttcaatcaagctctctaaaattatttatgggtaataaaaaagccttcctagcaaatctgataggaaggctttagagttagatgtagaaagttttggatcaactagatccatataattctagatccatataattcgcaagactattatacaatatttgcttgaattgtcaacactaaatttgtag

SEQ ID NO: 33023 - DNA, 260 bp, Unknown
  Description of Unknown: RightRegion for integrase B7024 sequence
gtagattgcatagtctttaaccgctcaacttcttcggttgatatatttctttatatctgattatcacttttcggagtacggtggacctgacggagaactcggtgcatcactcagatatttaagtcagagatttacaatgccgctgccggaattaaaagccaccttaaccgacatcggtaccgaggaattaaatcaccttgaaatgataggtgcaattgtatatcagcttacaaaagacctcacggaagatgaaatcaaaa

SEQ ID NO: 33024 - DNA, 260 bp, Unknown
  Description of Unknown: RightRegion for integrase B7025 sequence
tcttttatcgatgttataactattgatggaaattataacattgacattaaatttttataattttttttacacatttacttgtactaagttactatcaccacctggttaatgttatttagtacaagcactaaaatagaaagaagtacagtaaaaattatttgtacttctttctgtatactattataatattattagatagttttttcggttctgttggccttattactatctggagcatttactgttgcagcagtagatgc

SEQ ID NO: 33025 - DNA, 260 bp, Unknown
  Description of Unknown: RightRegion for integrase B7026 sequence
gtagattgcatagtctttaaccgctcaacttcttcggttgatatatttctttatatctgattatcacttttcggagtacggtggacctgacggagaactcggcgcatcactcagatatttaagtcagagatttacaatgccgctgccggaattaaaagccaccttaaccgacatcggtaccgaggaattaaatcaccttgaaatgataggtgcaattgtatatcagcttacaaaaggcctcacggaagatgaaatcaaaa

SEQ ID NO: 33026 - DNA, 260 bp, Unknown
  Description of Unknown: RightRegion for integrase B7027 sequence
atcgataaaataatcttcaatcgttccctgtcttccgttgagttatttttctgtttttgaattataacttttgggatatgggggacctgatggtgagctcggtgcatcacttagatatttaagtcagaggtacacaatgccgttccctgaacttcaagcaacacttaccgacataggtacagaagaacttggtcaccttgaaatgataggtactattgtttatcagctaactaaagacttaacagaagaccaattaaaag

SEQ ID NO: 33027 - DNA, 260 bp, Unknown
  Description of Unknown: RightRegion for integrase B7028 sequence
gttcgaggaaaattggaatggtgcccccgggcggattcgaaccgtcgacacccgctttaggaggtcatgagctcttaccctacctgcggtttttcattttcatcaatatctctatttccgcaggtaatttagctattctgccgtttttgctcttcttgattagttttcaatttcaccctatttacaccccttcaccccttcattttgacttgcaggggtgaaatttttgggttagcctcgggggcgaggccctcaaagcc

SEQ ID NO: 33028 - DNA, 260 bp, Unknown
  Description of Unknown: RightRegion for integrase B7029 sequence
gtagattgcatagtctttaaccgctcaacttcttcggttgatatatttctttatatctgattatcacttttcggagtacggtggacctgacggagaactcggcgcatcactcagatatttaagtcagagatttacaatgccgctgccggaattaaaagccaccttaaccgacatcggtaccgaggaattaaatcaccttgaaatgataggtgcaattgtatatcagcttacaaaagacctcacggaagatgaaatcaaaa

SEQ ID NO: 33029 - DNA, 260 bp, Unknown
  Description of Unknown: RightRegion for integrase B7030 sequence
aacatacaaagtacattaacttcggtcgtgggaactattggttgcgggagctggatttgaaccaacgaccttcgggttatgagaactgacaagcggtgaacggcatgagtgaagcccctcgcaaaagtaactataagccccgtggagaagtgataagcaacgagggaaaactactcacggaagcaggcacaagccctcacatggagcgacaagcgacacaaggcaagctccacaagagcaaaaagaaaaaacacggaaaa

SEQ ID NO: 33030 - DNA, 260 bp, Unknown
  Description of Unknown: RightRegion for integrase B7031 sequence
aatatccgagaaaagggcccgcactcacgtgttcgagtacggcccgaatggtggacttgataagtccaaatccgaaatagtagcggtattgttttcgccgctgtaattgtaggttatgacaatcttatcatcatagacgaaaacggcgtgaacaaaggtatcaataagctgctggcggtatttttcgcttgttatgtcgccgtccttaaagctggaaatccaataaattatttgttccctgctgatgatccgccgcgcaa

SEQ ID NO: 33031 - DNA, 260 bp, Unknown
  Description of Unknown: RightRegion for integrase B7032 sequence
gtagattgcgtagtctttaaccgctcaacttcttcggttgatatatttctttatatctgattatcacttttcggagtacggtggacctgacggagaactcggcgcatcactcagatatttaagtcagagatttacaatgccgctgccggaattaaaagccaccttaaccgacatcggtaccgaggaattaaatcaccttgaaatgataggtgcaattgtatatcagcttacaaaagacctcacggaagatgaaatcaaaa

SEQ ID NO: 33032 - DNA, 109 bp, Unknown
  Description of Unknown: RightRegion for integrase B7033 sequence
aaaatcgaagtcagccccagcaagatgaaaattcattggcgttttaatgtcgaaaaataattttaggttccttgatttccaatagcgtaaacgcgtgccgtttctgctt

SEQ ID NO: 33033 - DNA, 260 bp, Unknown
  Description of Unknown: RightRegion for integrase B7034 sequence
ccgctggagcaggtaaccgctgctctgcgggagagttcgtgcagtgttgcgtgtgcctaagggctctcattttgatacaaattaaacctgaaaatcccgcaattctgcgaggttttttgtttttcggctgaaaatcaagagaaatgctatcactcatggatgtgaaaatcgaaagccaaatcgcaaacgataagcaaaggtatcgtttggtttttagggactgttttcagacattgtttgtacataagttgagctatcgt

SEQ ID NO: 33034 - DNA, 260 bp, Unknown
  Description of Unknown: RightRegion for integrase B7035 sequence
gccttgataagcaaggttagggttactagtgaatccatcgttattttgtggaaattatagagtgttttagtatcctttatttcaatcagtgtaaaagctcgtagtttaacggcattcaatttttttaacatcattttcatgacatcattccttccatattttgatacattggtaatagcatggctgcatagatcattacaatcacgacagcaacaataataaaaatgaggggttgcacaaaggttgttgccttattaaga

SEQ ID NO: 33035 - DNA, 260 bp, Unknown
  Description of Unknown: RightRegion for integrase B7036 sequence
attgataaaatcatcttcaatcgttccctatcttccgttgagttatttttctgtttttgaattataacttttgggatatgggggacctgatggtgagctcggtgcatcacttagatatttaagtcagaggtacacaatgccgttccctgaacttcaagcaacacttaccgacataggtacagaagaacttggtcaccttgaaatgataggcactattgtttatcagctaactaaagacttaacagaagaccaattaaaag

SEQ ID NO: 33036 - DNA, 260 bp, Unknown
  Description of Unknown: RightRegion for integrase B7037 sequence
gtggagcgcatcgtcttcaaaaagcccgaaaacgaattcgatattttcttttatgtttaaaagtatatctatttaccgtccgcaccgccgtattgttccataattatttgcgcatacttgggatttgggtttttaatattaacagggtattgcagttttttctcatagctccacataattttcagccctccgcaccaaagtcgttgtcccacggccaggggccgtctgtccatttccagctgccctctgccggagcatcg

SEQ ID NO: 33037 - DNA, 109 bp, Unknown
  Description of Unknown: RightRegion for integrase B7038 sequence
atcgataaaatcatcttcaatcgttccctatcttccgttgagttatttttctgtttttgaattataacttttgggatatgggggacctgatggtgagctcggtgcatca

SEQ ID NO: 33038 - DNA, 109 bp, Unknown; identical to SEQ ID NO: 33037
  Description of Unknown: RightRegion for integrase B7039 sequence

SEQ ID NO: 33039 - DNA, 109 bp, Unknown
  Description of Unknown: RightRegion for integrase B7040 sequence
atcgataaaatcatcttcaatcgctccctgtcttccgttgaattatttttctgtttttgaattataacttttgggatatgggggacctgatggtgagctcggtgcatca

SEQ ID NO: 33040 - DNA, 260 bp, Unknown
  Description of Unknown: RightRegion for integrase B7041 sequence
aacatacaaagtacattaacttcggtcgtgggaactattggttgcgggagctggatttgaaccaacgaccttcgggttatgagaactagcaggcaacaaacagcatgagtgaagcccctcgcaaaagtaactataagccccgtggagaagtgataagcaacgagggaaaactactcacggaagcaggcacaagccctcacatggagcgacaagcgacacaaggcaagctccacaagagcaaaaagaaaaaacacggaaaa

SEQ ID NO: 33041 - DNA, 260 bp, Unknown
  Description of Unknown: RightRegion for integrase B7042 sequence
ttcgaatcaatttctttcgatcgtaaatctggtgaattgctctttgatgcaaaatcataggttaatgctatatggtggaccggatggcgaaatcggagcttccatgcgctatctgtcacagcgtttcaccgcgccaaaccgtacctgtatgggaatattgaacgatatcggtacagaagcccctgaaatgttccgttcaggggctaacgctttttttgacgcttttgcaaccgtatagctccatttcataggaagcaaat

SEQ ID NO: 33042 - DNA, 109 bp, Unknown
  Description of Unknown: RightRegion for integrase B7043 sequence
atcgataaaatcatcttcaatcgttccctatcttccgttgagttatttttctgtttttgaattataatttttgggatatgggggacctgatggtgagctcggtgcatca

SEQ ID NO: 33043 - DNA, 260 bp, Unknown
  Description of Unknown: RightRegion for integrase B7044 sequence
atcgataaaatcatcttcaatcgttccctatcttccgttgagttatttttctgtttttgaattataacttttgggatatgggggacctgatggtgaacttggtgcatcacttagatatttaagtcagaggtacacaatgccgtttcctgaacttcaagcaacacttaccgacataggtacagaagaacttggtcaccttgaaatgataggcactattgtttatcagctaactaaagacttaacagaagaacaattaaaag

SEQ ID NO: 33044 - DNA, 109 bp, Unknown; identical to SEQ ID NO: 33037
  Description of Unknown: RightRegion for integrase B7045 sequence

SEQ ID NO: 33045 - DNA, 107 bp, Unknown
  Description of Unknown: RightRegion for integrase B7046 sequence
aacatacaaagcacattaaaatcagtcttaagaaatattggttgcggaggcaggatttgaacctacgaccttcgggttatgagcccgacgagctaccgaactgctcc

SEQ ID NO: 33046 - DNA, 109 bp, Unknown
  Description of Unknown: RightRegion for integrase B7047 sequence
aaaatcgaggtcagccccagcaagatgaaaattcattggcgttttaatgtcgaaaaataattttaggtttcttgatttccaatagcgtaaacgcgtgccgtttctgctt

SEQ ID NO: 33047 - DNA, 181 bp, Unknown
  Description of Unknown: RightRegion for integrase B7048 sequence
gccttgataagcaaggttcgtgtcactagtgaaaccatcgttattttatggaaattatagagcgttttactaacctttatttcaatcagcgtaaaagcacgtaatttaacggcattcaattttttcaacatcattttcatgacatcattccttccatattttgatacattggtaatagcat

SEQ ID NO: 33048 - DNA, 260 bp, Unknown
  Description of Unknown: RightRegion for integrase B7049 sequence
aatctgatagataaggtatttgttaaacctggcatcattgatataaattggagaatttaggtcagaaaaataacaaatttagatactcttgtttctaccaaagtgaaagctttaaccttggctttttttaaatttgtcatgagttttttcattttaaaaatttacctccatattttgatacatgggcataagcattgccgcataaagtaaaacgataatcagagccacaaagataaaaaccagtggctgtactaagttca

SEQ ID NO: 33049 - DNA, 108 bp, Unknown
  Description of Unknown: RightRegion for integrase B7050 sequence
gaccaggtgctggagtatttcgtcgataagatttacctgaccgacgacgggctggggtagtgcccgaaaagttgcgcactttggatcatggccgtccatggagcgatg

SEQ ID NO: 33050 - DNA, 69 bp, Unknown
  Description of Unknown: RightRegion for integrase B7051 sequence
gttcgtacaaaatgcaaatggtgcccccagcgggattcgaacccgcgatatccaccttgaaagggtggc

SEQ ID NO: 33051 - DNA, 260 bp, Unknown
  Description of Unknown: RightRegion for integrase B7052 sequence
gtagattgcatagtctttaaccgctcaacttcttcggttgatatatttctttatatctgattatcacttttcggagtacggtggacctgacggagaactcggcgcatcactcagatatttaagtcagagatttacaatgccgctgccggaattaaaagccaccttaaccgacatcggtaccgaggaattaaatcaccttgaaatgataggggcaattgtatatcagcttacaaaagacctcacggaagatgaaatcaaaa

SEQ ID NO: 33052 - DNA, 260 bp, Unknown
  Description of Unknown: RightRegion for integrase B7053 sequence
gtagattgcatagtctttaaccgctcaacttcttcggttgatatatttctttatatctgattatcacttttcggagtacggtggacctgacggagaactcggcgcatcactcagatatttaagtcagagatttacaatgccgctgccggaattaaaagccaccttaaccgacatcggtaccgaagaattaaatcatcttgaaatgataggtgcaattgtatatcagcttacaaaagacctcacggaagatgaaatcaaaa

SEQ ID NO: 33053 - DNA, 260 bp, Unknown
  Description of Unknown: RightRegion for integrase B7054 sequence
gtagattgcatagtctttaaccgctcaacttcttcggttgagatatttctttatatctgattatcacttttcggagtacggtggacctgacggagaactcggcgcatcactcagatatttaagtcagagatttacaatgccgctgccggaattaaaagccaccttaaccgacatcggtaccgaggaattaaatcaccttgaaatgataggtgcaattgtatatcagcttacaaaagacctcacggaagatgaaatcaaaa

SEQ ID NO: 33054 - DNA, 260 bp, Unknown
  Description of Unknown: RightRegion for integrase B7055 sequence
ccgctggagcaggtaaccgctgctctgcgggagagttcgtgcagtattgcgtgtgcctaagggctctcattttgatacaaaataatcccaaaaatcccgcaattctgcgaggttttttgtttttcggctgaaaatcaagagaaatgctatcactcatggatgtgaaaatcgaaagccaaatcgcaaacgataggaaaaggtatcgtttgatttctgaaggctgttttcagacattgtttgtacatatatagaactatcgt

SEQ ID NO: 33055 - DNA, 260 bp, Unknown
  Description of Unknown: RightRegion for integrase B7056 sequence
atcatagaggagatctatatagacgggactgaggtaaccgggattaagccccggatttaatcttacccgtatggtggactaagttgcacactctgtactcactcccgcgccgccgaaaaagacgatgcggttactctcctgcacccatgttttcagagtttccagcttgttcacggtcttccgcctccatttctttcagcagcttcttgtcctgcttcgacgataaatccagctgtgcatacatgtccggccgccgcgcc

SEQ ID NO: 33056 - DNA, 260 bp, Unknown; identical to SEQ ID NO: 33025
  Description of Unknown: RightRegion for integrase B7057 sequence

SEQ ID NO: 33057 - DNA, 260 bp, Unknown
  Description of Unknown: RightRegion for integrase B7058 sequence
gtagattgcatagtctttaaccgctcaacttcttcgattgatatatttctttatatctgattatcacttttcggagtacggtggacctgacggagaactcggcgcatcactcagatatttaagtcagagatttacaatgccgctgccggaattaaaagccaccttaaccgacatcggtaccgaagaattaaatcaccttgaaatgataggtgcaattgtatatcagcttacaaaaggcctcacggaagatgaaatcaaaa

SEQ ID NO: 33058 - DNA, 260 bp, Unknown
  Description of Unknown: RightRegion for integrase B7059 sequence
gtagattgcatagtctttaaccgctcaacttcttcggttgatatatttctttatatctgattatcacttttcgtagtacggtggacctgacggagaactcggtgcatcactcagatatttaagtcagagatttacaatgccgctgccggaattaaaagccaccttaaccgacatcggtaccgaggaattaaatcaccttgaaatgataggtgcaattgtatatcagcttacaaaagacctcacggaagatgaaatcaaaa

SEQ ID NO: 33059 - DNA, 109 bp, Unknown
  Description of Unknown: RightRegion for integrase B7060 sequence
aacatacaaagtacattaacttcggtcgtgggaactattggttgcgggagctggatttgaaccaacgaccttcgggttatgagcccgacgagctaccgaactgctccat

SEQ ID NO: 33060 - DNA, 260 bp, Unknown
  Description of Unknown: RightRegion for integrase B7061 sequence
gtagattgcatagtctttaaccgctcaacttcttcggttgatatatttctttatatctgatcatcacttttcggagtacggtggacctgacggagaactcggcgcatcactcagatatttaagtcagagatttacaatgccgctgccggaattaaaagccaccttaaccgacatcggtaccgaggaattaaatcaccttgaaatgataggtgcaattgtatatcagcttacaaaagacctcacggaagatgaaatcaaaa

SEQ ID NO: 33061 - DNA, 260 bp, Unknown
  Description of Unknown: RightRegion for integrase B7062 sequence
atcgataaaatcatcttcaatcgttccctatcttccgttgagttatttttctgtttttgaattataacttttgggatatgggggacctgatggtgagctcggtgcatcacttagatatttaagtcagaggtacacaatgccgttccctgaacttcaagcaacacttaccgacataggtacagaagaacttggtcaccttgaaatgataggtactattgtttatcagctaactaaagacttaacagaagaccaattaaaag

SEQ ID NO: 33062 - DNA, 260 bp, Unknown; identical to SEQ ID NO: 33058
  Description of Unknown: RightRegion for integrase B7063 sequence

SEQ ID NO: 33063 - DNA, 260 bp, Unknown
  Description of Unknown: RightRegion for integrase B7064 sequence
atcatagaggagatctatatagacgggactgaggtaaccgggattaagccccggatttaatcttacccgtatggtggactaagttgcacactccgtactcactcccgcgccgccgaaaaagacgatgcggttactctcctgcacccatgctttcagagtttccagcttgttcacggtcttccgcctccatttccttcagcagctttttgtcctgcttcgacgataaatccagctgttcgtacatatccggccgccgcgcc

SEQ ID NO: 33064 - DNA, 260 bp, Unknown; identical to SEQ ID NO: 33023
  Description of Unknown: RightRegion for integrase B7065 sequence

SEQ ID NO: 33065 - DNA, 260 bp, Unknown
  Description of Unknown: RightRegion for integrase B7066 sequence
atcgataaaatcatcttcaatcgttccctctcttccgttgagttatttttctgtttttgaattataacttttgggatatgggggacctgatggtgagctcggtgcatcacttagatatttaagtcagaggtacacaatgccgttccctgaacttcaagcaacacttaccgacataggtacagaagaacttggtcaccttgaaatgataggcactattgtttatcagctaactaaagacttaacagaagaccaattaaaag

SEQ ID NO: 33066 - DNA, 260 bp, Unknown
  Description of Unknown: RightRegion for integrase B7067 sequence
gccttgataagcaaggttcgagttactagtgaatccatcgttattttatggaaattatagagcgttttactaacctttatttcaatcaaggacactaaaattcttgattgagcataaaaaaagacttggcagcccacgctaccaagtgacatgaaaaacaaaaacattcagcgcgtaatcgcctaaagtacatatatagtgtacctttatttagattaaatgtctaatgcaaaacaaagaatacacaaaaaagcccgact

SEQ ID NO: 33067 - DNA, 260 bp, Unknown
  Description of Unknown: RightRegion for integrase B7068 sequence
atcgataaaatcatcttcaatcgttccctatcttccgttgagttatttttctgtttttgaattataacttttgggatatgggggacctgatggtgagcttggtgcatcacttagatatttaagtcagaggtacacaatgccgttccctgaacttcaagcaacacttaccgacataggtacagaagaacttggtcaccttgaaatgataggcactattgtttatcagctaactaaagacttaacagaagaccaattaaaag

SEQ ID NO: 33068 - DNA, 260 bp, Unknown
  Description of Unknown: RightRegion for integrase B7069 sequence
atcgataaaatcatcttcaatcgttccctatcttccgttgagttatttttctgtttttgaattataatttttgggatatgggggacctgatggtgagcttggtgcatcacttagatatttaagtcagaggtacacaatgccgttccctgaacttcaagcaacacttaccgacataggtacagaagaacttggtcaccttgaaatgataggcactattgtttatcagctaactaaagacttaacagaagaccaattaaaag

SEQ ID NO: 33069 - DNA, 109 bp, Unknown; identical to SEQ ID NO: 33032
  Description of Unknown: RightRegion for integrase B7070 sequence

SEQ ID NO: 33070 - DNA, 109 bp, Unknown
  Description of Unknown: RightRegion for integrase B7071 sequence
gttgaacgcattgtataccaaaaatcacaaaacgcctttgaaatttacttttatgtttaattttttatatctaatttccgtccgcaccaccgtattgagttatgataat

SEQ ID NO: 33071 - DNA, 109 bp, Unknown
  Description of Unknown: RightRegion for integrase B7072 sequence
aaaatcgaagtcagccccagcaagatgaaaattcattggcgttttaatgtcgaaaaataattttaggtttcttgatttccaatagcgtaaacgcgtgccgtttctgctt

SEQ ID NO: 33072 - DNA, 260 bp, Unknown; identical to SEQ ID NO: 33023
  Description of Unknown: RightRegion for integrase B7073 sequence

SEQ ID NO: 33073 - DNA, 260 bp, Unknown; identical to SEQ ID NO: 33036
  Description of Unknown: RightRegion for integrase B7074 sequence

SEQ ID NO: 33074 - DNA, 260 bp, Unknown
  Description of Unknown: RightRegion for integrase B7075 sequence
aacatacaaagtacattaacttcggtcgtgggaactattggttgcgggagctggatttgaaccaacgaccttcgggttatgagaactggcaagcggtgaacggcatgagtgaagcccctcgcaaaagtaactataagccccgtggagaagtgataagcaacgagggaaaactactcacggaagcaggcacaagccctcacatggagcgacaagcgacacaaggcaagctccacaagagcaaaaagaaaaaacatggaaaa

SEQ ID NO: 33075 - DNA, 260 bp, Unknown
  Description of Unknown: RightRegion for integrase B7076 sequence
aatatccgagaaaagggcccgcactcacgtgttcgagtacggcccgaatggtggacctgacgggagtcgaacccgttaaattaaggctcataacgccagtatttacaatgctttgaacttttcgtgacaaatttcatgacaaaattcctcatcatccgatataaacttttccgtccacgccaacagccagacatacaatcgtggcatccagtttgaaccacacggatccatcatcgaactttctgacctctaccggtttg

SEQ ID NO: 33076 - DNA, 260 bp, Unknown
  Description of Unknown: RightRegion for integrase B7077 sequence
gttcgtacaaaatgcaaatggtgcccccgggcggattcgaaccgtcgacacccgctttaggaggtcatgagctattaccctacctgcggtttttcattttcatcaatatctctgtttccgcaggtaatttagctattctgccgtttttgctcttcttgattagttttctatttcaccctttttacacccctttaccccttcattttgacttgcaggggtgaaatttttgggttagcctcgggggcgaggccctcaaagcc

SEQ ID NO: 33077 - DNA, 260 bp, Unknown
  Description of Unknown: RightRegion for integrase B7078 sequence
atcgataaaatcatcttcaatcgctccctatcttccgttgagttatttttctgtttttgaattataacttttgggatatgggggacctgatggtgagctcggtgcatcacttagatatttaagtcagaggtacacaatgccgttccctgaacttcaagcaacacttaccgacataggtacagaagaacttggtcaccttgaaatgataggtactattgtttatcagctaactaaagacttaacagaagaccaattaaaag

SEQ ID NO: 33078 - DNA, 260 bp, Unknown; identical to SEQ ID NO: 33035
  Description of Unknown: RightRegion for integrase B7079 sequence

SEQ ID NO: 33079 - DNA, 260 bp, Unknown; identical to SEQ ID NO: 33061
  Description of Unknown: RightRegion for integrase B7080 sequence

SEQ ID NO: 33080 - DNA, 260 bp, Unknown
  Description of Unknown: RightRegion for integrase B7081 sequence
gtagatcgcatagtctttaaccgctcaacttcttcggttgatatatttctttatatctgattatcacttttcggagtacggtggacctgacggagaactcggcgcatcactcagatatttaagtcagagatttacaatgccgctgccggaattaaaagccaccttaaccgacatcggtaccgaggaattaaatcaccttgaaatgataggtgcaattgtatatcagcttacaaaagacctaacagaagatgaaatcaaaa

SEQ ID NO: 33081 - DNA, 260 bp, Unknown
  Description of Unknown: RightRegion for integrase B7082 sequence
aaaattgaagtcagccccagcaagatgaaaatccattggcgttttaacgtcgaaaaataattttaggtttcttgatttcaatcaagctctctaaaattatttatgggtaataaaaaagccttcctagcaaatctgataggaaggctttagagttagatgtagaaagttttggatcaactagatccatataattcgcaaggctattatacaatatttgcttgaattgtcaacactaaatttgtagtgtttggccaacataa

SEQ ID NO: 33082 - DNA, 109 bp, Unknown
  Description of Unknown: RightRegion for integrase B7083 sequence
attgataaaatcatcttcaatcgttccctatcttccgttgagttatttttctgtttttgaattataacttttgggatatgggggacctgatggtgagctcggtgcatca

SEQ ID NO: 33083 - DNA, 109 bp, Unknown
  Description of Unknown: RightRegion for integrase B7084 sequence
gaacagatcatatatgataaggaatccggaaaaatgtcttttgacatcattatttcctgaattgaaaatcccgcaaacccgcataaacactgggtttgccggtctatta

SEQ ID NO: 33084 - DNA, 260 bp, Unknown
  Description of Unknown: RightRegion for integrase B7085 sequence
gggcttataaacaaggttcaggtgacagctgaggacattgttatcaattggaaaatataaataattttagtaacctacatttcaatcaaggatagtaaaattattgattttttccatctcatacatctgcaacgaatgcaacacgagatcacgatatttccaggttgataccaggtactcaataacctcttggtcctctatcttgcattccatgagtagcaacagcttgaccgtgtacttatttttcaaaaccggcacct

SEQ ID NO: 33085 - DNA, 260 bp, Unknown
  Description of Unknown: RightRegion for integrase B7086 sequence
aacatacaaagtacattaacttcggtcgtgggaactattggttgcgggagctggatttgaaccaacgaccttcgggttatgagaactagcaggcaacaaacagcatgagtgaagcccctcgcaaaagtaactataagccccgtggagaagcgacaagcgacacaaggcaagctccacaagagcaaaaagaaaaaacacggaaaaagaaaacaaaaaacgcaaacaaacagcggacaaaaccacaaagaaaaaagacccga

SEQ ID NO: 33086 - DNA, 180 bp, Unknown
  Description of Unknown: RightRegion for integrase B7087 sequence
gccttgataagcaaggttcgtgtcactagtgaatccatcgttattttgtggaaattatagagcgttttagtaacgttcatttcaatcagtgtaaaagctcgtagtttaacggcattcaatttttttaacatcattttcatgacatcattccttccatattttgatacattggtaatagca

SEQ ID NO: 33087 - DNA, 68 bp, Unknown
  Description of Unknown: RightRegion for integrase B7088 sequence
gttcgtacaaaatgcaaatggtgcccccagcgggattcgaacccgcgatatccaccttgaaagggtgg

SEQ ID NO: 33088 - DNA, 109 bp, Unknown
  Description of Unknown: RightRegion for integrase B7089 sequence
aatatccgagaaaagggcccgcactcacgtgttcgagtacggcccgaatggtggaggtgaggggagtcgaacccctgtccgaagatctgtcaaccagaatttctccgag

SEQ ID NO: 33089 - DNA, 260 bp, Unknown; identical to SEQ ID NO: 33023
  Description of Unknown: RightRegion for integrase B7090 sequence

SEQ ID NO: 33090 - DNA, 109 bp, Unknown; identical to SEQ ID NO: 33032
  Description of Unknown: RightRegion for integrase B7091 sequence

SEQ ID NO: 33091 - DNA, 109 bp, Unknown; identical to SEQ ID NO: 33037
  Description of Unknown: RightRegion for integrase B7092 sequence

SEQ ID NO: 33092 - DNA, 260 bp, Unknown
  Description of Unknown: RightRegion for integrase B7093 sequence
gttcgtacaaaatgcaaatggtgcccccgggcggattcgaaccgtcgacacccgctttaggagatatgatttaatgctaccccctactattcatcaagcatcattgaacaccatataaccgcagataaacatagcagtttgtgtcttttacctccggtagctgcgcctacgcttttacaaacatattactaacagctttagctaaactgcactcaatgaattgttgaaaactattcaaagaaacggagtgcaaagatgtc

SEQ ID NO: 33093 - DNA, 260 bp, Unknown; identical to SEQ ID NO: 33052
  Description of Unknown: RightRegion for integrase B7094 sequence

SEQ ID NO: 33094 - DNA, 260 bp, Unknown
  Description of Unknown: RightRegion for integrase B7095 sequence
atcgataaaatcatcttcaatcgttccctatcttccgttgagttatttttctgtttttgaattataacttttgggatatgggggacctgatggtgagctcggtgcatcacttagatatttaagtcagaggtacacaatgccgttccctgaacttcaagcaacacttaccgacataggtacagaagaacttggtcaccttgaaatgataggcactattgtttatcagctaactaaagacttaacagaagaccaattaaaag

SEQ ID NO: 33095 - DNA, 260 bp, Unknown; identical to SEQ ID NO: 33024
  Description of Unknown: RightRegion for integrase B7096 sequence

SEQ ID NO: 33096 - DNA, 260 bp, Unknown
  Description of Unknown: RightRegion for integrase B7097 sequence
gccttgataagcaaggttcgagtgactagtgaatccatcgttattttatggaaattatagagcgttttagtaaccttcatttcaatcaaggttactaaaattcttgatttgagcataaaaaatacttaataacgcttagccttttttgaaatggtataataaaacaaaaaggagaaatcgagatggagacttgcaaacacacaatagaaattataaacgatgagccagaaaatgtagatacactactttttgctaaaacg

SEQ ID NO: 33097 - DNA, 260 bp, Unknown; identical to SEQ ID NO: 33021
  Description of Unknown: RightRegion for integrase B7098 sequence

SEQ ID NO: 33098 - DNA, 260 bp, Unknown
  Description of Unknown: RightRegion for integrase B7099 sequence
gatcaaattatctacgacaaggaatccggctgcctgtattttgatatcatcatttcctagacaattggatactatccaaatcttcatatttccgtaatactttatttttgtcaaaaagcctgaaatcccgctgtttatgcgggcttcaggcacaattataggttactgcactccggtggaccggagtgtaataacctataatatagatttatatagataaacatataagtccggcatatgacccagcgccgggctggtgg

SEQ ID NO: 33099 - DNA, 260 bp, Unknown
  Description of Unknown: RightRegion for integrase B7100 sequence
gccttgataagcaaggttcgagttactagtgaaagcatcgttattttgtggaaattatagagcgttttactaacctttatttcaatcagcgtaaaagcacgtaattttacggcattcaattttttcaacatcattttcatgacatcattccttccatattttgatacattggtaatagcatagctgcatagatcattacaatcacgacagcaacaataacaaaaatgaggggttgcacaaaggttgttgccttattaaga

SEQ ID NO: 33100 - DNA, 109 bp, Unknown; identical to SEQ ID NO: 33059
  Description of Unknown: RightRegion for integrase B7101 sequence

SEQ ID NO: 33101 - DNA, 109 bp, Unknown
  Description of Unknown: RightRegion for integrase B7102 sequence
aaaatcgaggtcagccccagcaagatgaaaattcattggcgttttaacgccgaaaaataattttaggtttcttgatttccaatagcgtaaacgcgtgccgtttctgctt

SEQ ID NO: 33102 - DNA, 260 bp, Unknown
  Description of Unknown: RightRegion for integrase B7103 sequence
gtagattgcatagtctttaaccgctcaacttctttggttgatatatttctttatatctgattatcacttttcggagtacggtggacctgacggagaactcggcgcatcactcagatatttaagtcagagatttacaatgccgctgccggaattaaaagccaccttaaccgacatcggtaccgaggaattaaatcaccttgaaatgataggtgcaattgtatatcagcttacaaaagacctcacggaagatgaaatcaaaa

SEQ ID NO: 33103 - DNA, 124 bp, Unknown
  Description of Unknown: RightRegion for integrase B7104 sequence
aatatccgagaaaagggcccgcactcacgtgttcgagtacggcccgaatggtggagctgacgggagtcgaacccgtgtccgaaaagaaatcagttagagtatctccgggcgcagtgtgtttatt

SEQ ID NO: 33104 - DNA, 105 bp, Unknown
  Description of Unknown: RightRegion for integrase B7105 sequence
ctaattaaatctattgatgtgtacaacaacgaccgaattaaaatccactggaacatttaattttttaaccatgaaaagatattaggtatcgtccattgaaactgg

SEQ ID NO: 33105 - DNA, 260 bp, Unknown; identical to SEQ ID NO: 33077
  Description of Unknown: RightRegion for integrase B7106 sequence

SEQ ID NO: 33106 - DNA, 260 bp, Unknown
  Description of Unknown: RightRegion for integrase B7107 sequence
attgataaaattgtcttcaatcgttccctatcttccgttgagttatttttctgtttttgaattataacttttggaatatgggggacctgatggtgagctcggtgcatcacttagatatttaagtcagaggtacacaatgccgttccctgaacttcaagcaacacttaccgacataggtacagaagaacttggtcaccttgaaatgataggtactattgtttatcagctaactaaagacttaacagaagaccaattaaaag

SEQ ID NO: 33107 - DNA, 120 bp, Unknown
  Description of Unknown: RightRegion for integrase B7108 sequence
ggcgacgcaaccaaggttacagaaacgaatcttctgctacacttctttaatcctgtataataaaacttgacacatacaaaacaatcaaagtataataaaaacaaaggagtgtgtcatcaa

SEQ ID NO: 33108 - DNA, 109 bp, Unknown
  Description of Unknown: RightRegion for integrase B7109 sequence
atcgataaaatcatcttcaatcgttccctatcttccgttgagttatttttctgtttttgagttataactttgggggtatgggggacctgatggtgagctcggtgcatca

SEQ ID NO: 33109 - DNA, 260 bp, Unknown
  Description of Unknown: RightRegion for integrase B7110 sequence
aaattcattgtatttgaccgaaaagcggatcggttcgaatttcactattacatatcgtaatttcttataaaatcaaggttttgagcactaatctgttactgacatacggcgggcctgacggcgaaatcggcgcttccatgcgctatctttcccagcgttacaccatgccctacgcagagggaaagggacttctgaccgatattggcacagaagagctggcccatatggagattgtggctactattgtctgtcagcttaca

SEQ ID NO: 33110 - DNA, 260 bp, Unknown
  Description of Unknown: RightRegion for integrase B7111 sequence
gtggatcatataatatacgacaaagaagctgatacaatggaattcttctttattccgtaacaagaataagttcccattagtaaacgtctacagaccgccatattgtgatatgattgcctgcgccagcttcgcatttgtctccttgatgttcacgggacattgaagtctcttttcataaatccacatttaacaaccacacgctccttcccaaggccatggaccatcgatccatgcattccaatcgtcgcacgtatccacat

SEQ ID NO: 33111 - DNA, 114 bp, Unknown
  Description of Unknown: RightRegion for integrase B7112 sequence
aaattcattgtatttgaccgaaaagcagatcggttcgaatttcactattacatatcgtaatttcttataaaatcaagattttgagcactaatctgttactgacatacggcgggc

SEQ ID NO: 33112 - DNA, 109 bp, Unknown
  Description of Unknown: RightRegion for integrase B7113 sequence
gtggatcatataatatacgacaaagaagctgatacaatggaattcttctttattccgtaacaagaataagttcccattagtaaacgtctacagaccgccatattgtgat

SEQ ID NO: 33113 - DNA, 109 bp, Unknown
  Description of Unknown: RightRegion for integrase B7114 sequence
aaattcattgtatttgaccgaaaagcggatcggttcgaatttcactattacatatcgtaatctcttgtaaaatcaaggtttccgagactaatctgttactgacatacag

SEQ ID NO: 33114 - DNA, 260 bp, Unknown
  Description of Unknown: RightRegion for integrase B7115 sequence
ccaaaaaaccgcttaaacaagcggctttttattttttgtgttgcatttcgtgttgtatgattgattcgaaatagttatttaccttactgtcaacggcaattctttcggccgagaatgtattttgataaacctttttcatggtcttgtcggtcttccagccgccacgctccatcgcatatttgtcggggatgtttaacatcagcatcacagatgcgtttacatgccgtaagtcgtggaaagtgatgtgtggcaactcgtgt

SEQ ID NO: 33115 - DNA, 260 bp, Unknown
  Description of Unknown: RightRegion for integrase B7116 sequence
gccttgataagcaaggttcgagttactagtgaatccatcgttattttatggaaattatagagcgttttactaacctttatttcaattagcgtaaaagctcgtagtttaacggcattcaatttttttaacatcattttcatgacatcattccttccatattttgatacattggtaatagcatggctgcatagatcattacaatcacgacagcaacaataacaaaaatgaggggttgcacaaaggttgttgccttattaaga

SEQ ID NO: 33116 - DNA, 109 bp, Unknown; identical to SEQ ID NO: 33112
  Description of Unknown: RightRegion for integrase B7117 sequence

SEQ ID NO: 33117 - DNA, 109 bp, Unknown
  Description of Unknown: RightRegion for integrase B7118 sequence
attcagctggaatggacgaaggacgtcaagcgcatcagggacattactttttttacctgattttatgcggggtgatgggggagccgaacggctcatcaagcagcagaag

SEQ ID NO: 33118 - DNA, 260 bp, Unknown
  Description of Unknown: RightRegion for integrase B7119 sequence
aaattcattgtatttgaccgaaaagcagatcggttcgaatttcactattacatatcgtaatttcttataaaatcaaggttttgagcactaatctgttactgacatacggcgggcctgacggcgaaatcggcgcttccatgcgctatctttcccagcgttacaccatgccctacgcagagggaaagggacttctgaccgatattggcacagaagagctggcccatatggagattgtggctgctattgtctgtcagcttaca

SEQ ID NO: 33119 - DNA, 260 bp, Unknown
  Description of Unknown: RightRegion for integrase B7120 sequence
atagaccatatcacatacgaaaaagaagctaataacctcgccatatatttttatctttgacctatatctaaaagcaatacggtgggccgcacggtgaactcggtgcgtcgcttcgctatctttctcagcgatattcaatgccgtatcccgaactcaagggattgcttacagacataggcgttgaggaattggggcaccttgaaatgataggaacaatggtacaccaacttactcgcaatttaacagaggatgagattgaa

SEQ ID NO: 33120 - DNA, 260 bp, Unknown
  Description of Unknown: RightRegion for integrase B7121 sequence
gtagataaaatcgtattcgacaggtcaatcccaaaagtcgatatatttttttatatctgattatcattttttacagtatggtggacctgatggggagttgggggcgtctttgaggtatttgagccagcggtttactatgccgctgccggagctaaaagcaacgcttactgacattggcacagaagagctgaaccaccttgaaatgattggcgctattgtttatcagcttacaaaagacctgacggaagatgagataaaaa

SEQ ID NO: 33121 - DNA, 109 bp, Unknown
  Description of Unknown: RightRegion for integrase B7122 sequence
attcagctggaatggacgaagggcgtcaagcgcatcagggacattactttttttacctgattttatgcggggtgatgggggagccgaacggctcatcaagcagcagaag

SEQ ID NO: 33122 - DNA, 109 bp, Unknown
  Description of Unknown: RightRegion for integrase B7123 sequence
gtggatcatatagtgtacgacaaagaagctgatacaatggaattcttttttattccgtaaaagaataagtacccattagcaaacgtctacagaccgccatattgtgata

SEQ ID NO: 33123 - DNA, 260 bp, Unknown
  Description of Unknown: RightRegion for integrase B7124 sequence
gagttaattgacaaggtgcaagtcacatctgacaagatagttattcgctggaagatttgataaatttagttacgctattttcaatgcaagaaagtaaatttgtcactcgggaaaaaataaaaaaaccttgctaaatgcaaggacacgaactttaaacaatcaactaaatgagccttcgctctacttcgattgtacgcaatttattgaccgatagcctaccacggtctgagccataaggagcgaccctataacttccgtag

SEQ ID NO: 33124 - DNA, 109 bp, Unknown
  Description of Unknown: RightRegion for integrase B7125 sequence
atagaccatatcacatacgaaaaagaagctaataacctcgccatatatttttatctttgacctatatctaaaagcaatacggtgggccgcacggtgaactcggtgcgtc

SEQ ID NO: 33125 - DNA, 109 bp, Unknown
  Description of Unknown: RightRegion for integrase B7126 sequence
atagaccatatcacatacgaaaaagaagctaataacctcgccatttatttttatctttgacctatatctaaaagcaatactgtgggccgcacggtgaactcggtgcgtc

SEQ ID NO: 33126 - DNA, 109 bp, Unknown
  Description of Unknown: RightRegion for integrase B7127 sequence
aaattcgttgtatttgaccgaaagtcggatcgcttcgaatttcactattacatatcatgatttcctgtaaaatcaaggtttccgagactaatctgttactgacatatgg

SEQ ID NO: 33127 - DNA, 109 bp, Unknown
  Description of Unknown: RightRegion for integrase B7128 sequence
atagaccatatcacatacgaaaaagaagctaataacctcgccatatatttttatctttgacctatatctaaaagcaatacggtgggccgcacggggaactcggtgcgtc

SEQ ID NO: 33128 - DNA, 109 bp, Unknown
  Description of Unknown: RightRegion for integrase B7129 sequence
atagaccatataacatacgaaaaagaggataacaacctcgctatttatttttatctctaatctatatctaaaagcaatacggtggacctcagggtgaattaggcgcttc

SEQ ID NO: 33129 - DNA, 260 bp, Unknown
  Description of Unknown: RightRegion for integrase B7130 sequence
gttgacagaatcacttatattaaaccaaaaggaataatcgaaattctttataaaatgtaaatcatatcttcgagcagttaggcggtctaaattgaacaaagatatgattttaggcattgtatcttcttgttactacttattcgccaaaattcgacaattatttttcggtgcggtcttgacttaccgcgagttataggtataatagaatatagaggtaacgtaaattttaatttattatcttttcccacatactttcatgc

SEQ ID NO: 33130 - DNA, 109 bp, Unknown; identical to SEQ ID NO: 33127
  Description of Unknown: RightRegion for integrase B7131 sequence

SEQ ID NO: 33131 - DNA, 260 bp, Unknown
  Description of Unknown: RightRegion for integrase B7132 sequence
atagaccatataacatacgaaaaagaagctaataacctcgctatttatttttatctttgacctatatctaaaagcaatacggtgggccgcacggggaactcggtgcgtcgcttcgctatctttctcagcgatattcaatgccgtatcccgaactcaagggattgcttacagacataggcgttgagcatacacaagaggatttttcactctcataagcgttaatttcccccgaacctgcaaggatttttgcctgccacttt

SEQ ID NO: 33132 - DNA, 260 bp, Unknown
  Description of Unknown: RightRegion for integrase B7133 sequence
gttgacagaatcacttatattaaaccaaaaggaataatcgaaattctttataaaatgtaaatcatatccttgagcagttaggtggtctaaattgaacaaagatatgattttaggcattgtatcttcttgttactacttattcgccaaaattcgacaattattttttggcgcggtcttgacttcccgcgagttataggtataatagaatgtagaggtaacgtaaattttaatttattatcttttcccacatactttcatgc

SEQ ID NO: 33133 - DNA, 109 bp, Unknown
  Description of Unknown: RightRegion for integrase B7134 sequence
atagaccatataacatacgaaaaagaggataacaacctcgctatttatttttatttataatctatatctaaaagcaatacggtggacctcagggtgaattaggcgcttc

SEQ ID NO: 33134 - DNA, 260 bp, Unknown
  Description of Unknown: RightRegion for integrase B7135 sequence
atagaccatataacatacgaaaaagaggataacaacctcgctatttatttttatctctaatctatatctaaaagcaatacggtggacctcagggtgaattaggcgcttcacttcgctatctttcacagcgctattcaatgccgtatccggagcttaaaggtttattgacggacatcggtgtggaagaattagggcatcttgaaatgataggcactatggtgcatcagctcacccgcaatttaaccgaagacgaaattgaa

SEQ ID NO: 33135 - DNA, 109 bp, Unknown; identical to SEQ ID NO: 33117
  Description of Unknown: RightRegion for integrase B7136 sequence

SEQ ID NO: 33136 - DNA, 260 bp, Unknown
  Description of Unknown: RightRegion for integrase B7137 sequence
attgacaaaatcatagtacatgaagagctgaacagctttgaaattatttggaatttttaatctataactctgacaagttttgaaatcacttccacgtgtgcactcatggcaaacatatccaccggctgcacggtttgcacttcataaccgagctcacgtagcacgcaaatatcgcgcgccatggacgccggattacaagacacatacaccatatgtttcggtttcatgatggccgccgcttttaaaacttcctctttaca

SEQ ID NO: 33137 - DNA, 109 bp, Unknown; identical to SEQ ID NO: 33127
  Description of Unknown: RightRegion for integrase B7138 sequence

SEQ ID NO: 33138 - DNA, 88 bp, Unknown
  Description of Unknown: RightRegion for integrase B7139 sequence
gctttaataagcaaggttagggtcactagtgattccatcgttattttatggaaattatagggagttttactatccttcatttcaatca

SEQ ID NO: 33139 - DNA, 109 bp, Unknown
  Description of Unknown: RightRegion for integrase B7140 sequence
atagaccatatcacatacgaaaaagaagctaataacctcgccatttatttttatctttgacctatatctaaaagcaatacggtgggccgcacggggaactcggtgcgtc

SEQ ID NO: 33140 - DNA, 109 bp, Unknown; identical to SEQ ID NO: 33117
  Description of Unknown: RightRegion for integrase B7141 sequence

SEQ ID NO: 33141 - DNA, 260 bp, Unknown
  Description of Unknown: RightRegion for integrase B7142 sequence
atcagtaagataatttatactaagtctggtgaggaaatcgagatttactactatatgtagtgtatatccttttgcagtacggcggaccggacggcgaattgggtgccagcctgcgctatctttcgcaaaagtttgccatgcccaaccgtcgggtcgccggtctcctcaacgatatcggtaccgaagagctggcgcacttggagatgatcggcgccatcgtccatcagcttaccaaaaacctctccatagaggagatcaag

SEQ ID NO: 33142 - DNA, 109 bp, Unknown
  Description of Unknown: RightRegion for integrase B7143 sequence
atagaccatattacatacgaaaaagaagctaataacctcgccatatatttttatctttgacctatatctaaaagcaatatggtgggccgcacggggaactcggtgcgtc

SEQ ID NO: 33143 - DNA, 109 bp, Unknown
  Description of Unknown: RightRegion for integrase B7144 sequence
atagaccatataacatacgaaaaagaggataacaacctcgctatttatttttatctctaatctatatctaaaagcaatacggtggacctcacggtgaattaggcgcttc

SEQ ID NO: 33144 - DNA, 109 bp, Unknown
  Description of Unknown: RightRegion for integrase B7145 sequence
gtggatcatattgtgtacaacaaagaatctgatacaatggaattcttctttgtttcttaaaagggtacttgcaaaaacaagtacccattagcaaacgtctacagaccgc

SEQ ID NO: 33145 - DNA, 260 bp, Unknown
  Description of Unknown: RightRegion for integrase B7146 sequence
aaattcattgtatttgaccgaaaagcggatcggttcgaatttcactattacatatcgtaatctcttgtaaaatcaaggtttccgagactaatctgttactgacatacagtgggcctgacggcgaaatcggcgcttccatgcgctatctttcccagcgttacaccatgccctacgcagagggaaagggacttctgaccgatattggcacagaagagctggcccatatggagattgtggctgctattgtctgtcagcttaca

SEQ ID NO: 33146 - DNA, 260 bp, Unknown
  Description of Unknown: RightRegion for integrase B7147 sequence
attgacaaaatcatagtacatgaagagctgaacagctttgaaattatttggaatttttaatctataactctgacaagttttgaaatcacttccacgtgcgcggtcatcgggaacatatctaccggctgcacggtttctacttcatagccgagcccacgaagcacaacaatatcgcgcgccatagacgccggattacaagacacatacaccatatgttttggtttcattgaggccgccgcttttagcacttcttctttaca

SEQ ID NO: 33147 - DNA, 109 bp, Unknown
  Description of Unknown: RightRegion for integrase B7148 sequence
atagaccatataacatacgaaaaagaggataacaacctcgctatttatttttatctctaatctatatctaaaagcaatatggtggacctcagggtgaattaggcgcttc

SEQ ID NO: 33148 - DNA, 109 bp, Unknown; identical to SEQ ID NO: 33112
  Description of Unknown: RightRegion for integrase B7149 sequence

SEQ ID NO: 33149 - DNA, 260 bp, Unknown
  Description of Unknown: RightRegion for integrase B7150 sequence
aaattcattgtatttgaccgaaaagcagatcggttcgaatttcactattacatatcgtaatttcttataaaatcaaggttttgagcactaatctgttactgacatatggcgggcctgacggagaaatcggcgcttccatgcgctatctttcccagcgttataccatgccctacgcagagggaaaaggacttctgactgacattggcacggaggagctggcccatatggagattgtggctgctatcgtctgtcagcttacg

SEQ ID NO: 33150 - DNA, 260 bp, Unknown
  Description of Unknown: RightRegion for integrase B7151 sequence
atagaccatataacatacgaaaaagaagataataacctcgccatttatttttatctttgacctatatctaaaagcaatacggtgggccgcacggggaactcggtgcgtcgcttcgctatctttctcagcgatattcaatgccgtatcccgaactcaagggattgcttacagacatcggcgttgaggaattggggcaccttgaaatgataggaacaatggtacaccaacttactcgcaatttgacagaggatgagattgaa

SEQ ID NO: 33151 - DNA, 260 bp, Unknown; identical to SEQ ID NO: 33118
  Description of Unknown: RightRegion for integrase B7152 sequence

SEQ ID NO: 33152 - DNA, 260 bp, Unknown
  Description of Unknown: RightRegion for integrase B7153 sequence
attgacaaaataatagtacatgaagagctgaatagctttgaaattatttggaatttttaatctataactctgacaagttttgaaatcacttccacgtgtgcactcatggcaaacatatccaccggctgcacggtttgcacttcataaccgagctcacgtagcacgcaaatatcgcgcgccatggacgccggattacaagacacatacaccatatgtttcggtttcatgatggccgccgcttttaaaacttcctctttaca

SEQ ID NO: 33153 - DNA, 260 bp, Unknown
  Description of Unknown: RightRegion for integrase B7154 sequence
atcagtaagataatttatactaagtctggtgaggaaatcgagatttactactatatgtagtgtatatccttttgcagtacggcgggccggatggcgaactgggcgccagcctgcgctatctttcgcaaaagttcgccatgcccaaccgccgggtcgccggcctgctcaatgatatcggtaccgaggagctggcgcatttggagatgatcggcgccatcgtccaccagctcacccgcaacctctccatcgaggagatcaag

SEQ ID NO: 33154 - DNA, 109 bp, Unknown; identical to SEQ ID NO: 33127
  Description of Unknown: RightRegion for integrase B7155 sequence

SEQ ID NO: 33155 - DNA, 109 bp, Unknown
  Description of Unknown: RightRegion for integrase B7156 sequence
gagttaattgacaaggtacaagtcacatctgacaagatagtgatccgctggaaaatttgataaatttggttacgctattttcaatcagtgtaaaggctttaaccttata

SEQ ID NO: 33156 - DNA, 109 bp, Unknown; identical to SEQ ID NO: 33112
  Description of Unknown: RightRegion for integrase B7157 sequence

SEQ ID NO: 33157 - DNA, 260 bp, Unknown
  Description of Unknown: RightRegion for integrase B7158 sequence
gccttgataagcaaggttagagttactagtgaaaccatcgttattttatggaaattatagagagttttagtgacatttatttcaatcaaggacactaaaattcttgattgagcataaaaaaagacttggcagcccacgctaccaagtgacatgaaaaacaaaaacattcagcgcgtaatcgcctaaagtacatgtatagtgtacctttatttagattaaatgtctaatgctatgcacaaaataaaaaaccgcccataaaa

SEQ ID NO: 33158 - DNA, 109 bp, Unknown
  Description of Unknown: RightRegion for integrase B7159 sequence
ctaattgataaaatcgtcatactaaacgatgatataaaaatctattggtcattttgctaattccagttcgacaatcgtctcaatgtggacggtgtggcagaactggtct

SEQ ID NO: 33159 - DNA, 109 bp, Unknown
  Description of Unknown: RightRegion for integrase B7160 sequence
atagaccatataacatacgaaaaagaggataacaacctcgctatttatttttatctctaatctatatctaaaagcaatacggtggacctcagggtgaattaggtgcttc

SEQ ID NO: 33160 - DNA, 109 bp, Unknown
  Description of Unknown: RightRegion for integrase B7161 sequence
aaattcattgtatttgaccgaaaagcggatcggttcgaatttcactattacatatcgtaatctcttataaaatcaaggttttgagcactaatctgttactgacatacgg

SEQ ID NO: 33161 - DNA, 109 bp, Unknown; identical to SEQ ID NO: 33117
  Description of Unknown: RightRegion for integrase B7162 sequence

SEQ ID NO: 33162 - DNA, 260 bp, Unknown
  Description of Unknown: RightRegion for integrase B7163 sequence
attcagctggaatggacgaaggacgtcaagcgcatcagggatattactttttttacctgattttatgcggggtggtgggggagccgaacggctcatcaagcagcagaagcggtttgcctgtctgcagcgtccgcacaagcgccgcacgctgccgctgcccgccggagcattcgtctgggcggcgattcagcaggtcgcgcagcccgcacgcagcaatgtcgctgacggcggatttcagcgctgcttgccgccgtgtgcca

SEQ ID NO: 33163 - DNA, 147 bp, Unknown
  Description of Unknown: RightRegion for integrase B7164 sequence
gattctatcgtaatccgcagtgaggaaattgaaattcattggaaattcagtgcgttctaactaggcaacatattgtctccacatgccccgtctccggaaacatatccaccggccatgccccgtcagcctgataccccatcttcttaa

SEQ ID NO: 33164 - DNA, 260 bp, Unknown
  Description of Unknown: RightRegion for integrase B7165 sequence
attcagctggaatggacgaaggacgtcaagcgcatcagggacattactttttttacctgattttatgcggggtgatgggggagccgaacggctcatcaagcagcagaagcggtttacctgtctgcagcgtccgcacaagcgccgcacgctgccgctgtccgccggagcattcgtctgggcggcgattcagcaggtcgcgcagcccgcacgcagcaatgtcgctgacggcggatttcagcgctgcttgccgccgtgtgccg

SEQ ID NO: 33165 - DNA, 109 bp, Unknown; identical to SEQ ID NO: 33128
  Description of Unknown: RightRegion for integrase B7166 sequence

SEQ ID NO: 33166 - DNA, 260 bp, Unknown
  Description of Unknown: RightRegion for integrase B7167 sequence
atagaccatatcacatacgaaaaagaagctaataacctcgccatttatttttatctttgacctatatctaaaagcaatacggtgggccgcacggggaactcggtgcgtcgcttcgctatctttctcagcgatattcaatgccgtatcccgaactcaagggattgcttacagacataggcgttgaggaattggggcaccttgaaatgataggaacaatggtacaccaacttactcgcaatttgacagaggatgagattgaa

SEQ ID NO: 33167 - DNA, 260 bp, Unknown
  Description of Unknown: RightRegion for integrase B7168 sequence
atagaccatataacatacgaaaaagaggataacaacctcgctatttatttttatctctaatctatatctaaaagcaatacggtggacctcagggtgaattaggcgcttcacttcgctatctttcacagcgctattcaatgccatatccggagcttaaaggtttattaacggacatcggtgtggaagaattagggcatcttgaaatgataggcactatggtgcatcagctcacccgcaatttaaccgaagacgaaattgaa

SEQ ID NO: 33168 - DNA, 173 bp, Unknown
  Description of Unknown: RightRegion for integrase B7169 sequence
gagctgattgacaaggtgcaagtcacatctgacaagatagtgatccgttggaaaatttgataaatttggttacgctattttcaataaaagaaagtaaatttgtcactcggacaaaaataaaaaaccttgctaaatgcaaggacacgaactttaaacaatcaactaaatgagcc

SEQ ID NO: 33169 - DNA, 260 bp, Unknown
  Description of Unknown: RightRegion for integrase B7170 sequence
atagaccatataacatacgaaaaagaagctaataacctcgccatttatttttatctttgacctatatctaaaagcaatacggtgggccgcacggggaactcggtgcgtcgcttcgctatctttctcagcgatattcaatgccgtatcccgaactcaagggattgcttacagacataggcgttgaggaattggggcaccttgaaatgataggaacaatggtacaccaacttactcgcaatttgacagaggatgagattgaa

SEQ ID NO: 33170 - DNA, 109 bp, Unknown
  Description of Unknown: RightRegion for integrase B7171 sequence
aaattcattgtatttgaccgaaaagcagatcggttcgaatttcactattacatatcgtaatttcttataaaatcaaggttttgagcactaatctgttactgacatacgg

SEQ ID NO: 33171 - DNA, 85 bp, Unknown
  Description of Unknown: RightRegion for integrase B7172 sequence
gtgaaatttcatatttcacagctttttgcaactatttggagagattttagggggtattgaccccaagcggttcgcatccgtgtta

SEQ ID NO: 33172 - DNA, 260 bp, Unknown
  Description of Unknown: RightRegion for integrase B7173 sequence
gagatcatcgaacacatcggcatcgacggcgaagaagtgcacatacactgggcattttaattctaaagcacacactataccagtttatacaaatggctttaaccatttatataaactggcatagtatgaaaacgtccagcagacaaagaaagagccggaatcttcccggccctttctcttacccctcacctatttattccattttcagtgttctcttcattttccctctttcaaaattcaatacaaattcctgcggcata

SEQ ID NO: 33173 - DNA, 260 bp, Unknown; identical to SEQ ID NO: 33150
  Description of Unknown: RightRegion for integrase B7174 sequence

SEQ ID NO: 33174 - DNA, 109 bp, Unknown
  Description of Unknown: RightRegion for integrase B7175 sequence
gcacttattaacaaagttcaagtgactgctgacagtatcaaaattttatggaaaatttaacaaatttagtatcattcatttccacaagtgtaaaagcttctacagactt

SEQ ID NO: 33175 - DNA, 109 bp, Unknown; identical to SEQ ID NO: 33112
  Description of Unknown: RightRegion for integrase B7176 sequence

SEQ ID NO: 33176 - DNA, 260 bp, Unknown
  Description of Unknown: RightRegion for integrase B7177 sequence
gattctatcatcatccgggatgaagagatcgaaattcactggaaattcactgtgttttgactaggcaacttatcacctctacatttgcggttgacggaaacatgtccacagcgcaggccttctccagtttatatccccgttcctgtaataccaccaggtctctggtcagactggtcggcttgcaggaaatgtagaccatgcggtctacgccgaagtcgatgatcttatccagagccttcgggtgaatgccgtcacgcgga

SEQ ID NO: 33177 - DNA, 109 bp, Unknown; identical to SEQ ID NO: 33170
  Description of Unknown: RightRegion for integrase B7178 sequence

SEQ ID NO: 33178 - DNA, 109 bp, Unknown
  Description of Unknown: RightRegion for integrase B7179 sequence
gactccattatcatccgtggcgaagatatagaaattcactggaaatttacttctttttagataggcaacttattgtctccacgttagcagttgccgggaacatgtctac

SEQ ID NO: 33179 - DNA, 109 bp, Unknown
  Description of Unknown: RightRegion for integrase B7180 sequence
gagttaattgaaaaagtgcaagtcacgtctgacaagatagtgatccgctggaaaatttgataaatttggttacgttcatttcaatcagcgtaaaagcttttactttgag

SEQ ID NO: 33180 - DNA, 109 bp, Unknown
  Description of Unknown: RightRegion for integrase B7181 sequence
ataaaacaaataaccctaaaagatgatgaaatggtgatacagtggcgttttgcggtataaatatatttactataccgcatttcaagcaacgtaaaaccgtcatgttttt

SEQ ID NO: 33181 - DNA, 260 bp, Unknown
  Description of Unknown: RightRegion for integrase B7182 sequence
ttagaacgagtaatcttttataagccaagtggagatattgatttatttttttatatttaactatatctttttaatgtctgctccgccgtattgcgtgcatattatttttgcgagctttggattaggattttttattcttataggatattcaagctttttctcgtaaacccacatagctaattaccctcctcgttgttatcccatggccacggatttgaaatccacgcccaacggttggcattatctctttttgcctgaat

SEQ ID NO: 33182 - DNA, 109 bp, Unknown
  Description of Unknown: RightRegion for integrase B7183 sequence
gactctatcattatccgcgggaatgatatcgaaatccattggaaatttactgtgttttaaccaggcaacttatcacctctacgtttgcggtggacgggaacatatctac

SEQ ID NO: 33183 - DNA, 109 bp, Unknown; identical to SEQ ID NO: 33178
  Description of Unknown: RightRegion for integrase B7184 sequence

SEQ ID NO: 33184 - DNA, 109 bp, Unknown
  Description of Unknown: RightRegion for integrase B7185 sequence
atagaccatataacatacgaaaaagaggataacaacctcgctatttatttttatctctaatctatatctaaaagcaatacggtgggcctcagggtgaattaggcgcttc

SEQ ID NO: 33185 - DNA, 109 bp, Unknown; identical to SEQ ID NO: 33127
  Description of Unknown: RightRegion for integrase B7186 sequence

SEQ ID NO: 33186 - DNA, 109 bp, Unknown; identical to SEQ ID NO: 33112
  Description of Unknown: RightRegion for integrase B7187 sequence

SEQ ID NO: 33187 - DNA, 260 bp, Unknown
  Description of Unknown: RightRegion for integrase B7188 sequence
aaattcatcgtattcgaccggaaggcggaacgcttcgaatttcactattacatatcgtaatctcttgtaaaatcaaggtttccgggactaatctgttactgacatatggcgggcctgacggagaaatcggcgcttccatgcgctatctttcccagcgttataccatgccctacgcagagggaaaaggacttctgactgacattggcacggaggagctggcccatatggagattgtggctgctatcgtctgtcagcttacg

SEQ ID NO: 33188 - DNA, 260 bp, Unknown
  Description of Unknown: RightRegion for integrase B7189 sequence
gagctgattgaaaaggtacaagtcacatctgacaaggtagtgatccgctggaaaatttgataaatttggttacgctattttcaatcaagggaagtaaatttgttatttttcgtttaaatagacaatctgaaaaaatgccgttataaacacaaatttcagagcaaacaaaaaaacggtagcataaatgctaccgctgttgttatcttatagagtctctggccacgggtcgtccgttacataggacatattagtaaaccgca

SEQ ID NO: 33189 - DNA, 260 bp, Unknown
  Description of Unknown: RightRegion for integrase B7190 sequence
atcgactggggtaaaggcagatacggaaaaagggatatcaaagacattacttttttttgacctctgtttgtggttaattctagcaccgaacggtgcaagaattaactacaatcaaaaatagaggcgtgcatccatcgggtgcgcgtcttttttacattttcgtcataatcacagaatctattgacaatcatttggatttgtgcaatatagagatatcaaattctgtgtgaaggtggtcttaccatgcccgcgctcatctt

SEQ ID NO: 33190 - DNA, 260 bp, Unknown
  Description of Unknown: RightRegion for integrase B7191 sequence
gtagaccacattacattcaaaaaaccggacaacacactggagatattctactatatttgatggatttttagccgcattttccgccacgaattgaaaagaaagtgcgattttcggcttaacaccgtcattgcctgtccatattttgactctatatctaaatgcaatacagtcctctttattgcatttagatataattaggtatagaaaaaggccgaacagtcttgtgaactgcccggccttttctcacatgagcattgtcg

SEQ ID NO: 33191 - DNA, 260 bp, Unknown
  Description of Unknown: RightRegion for integrase B7192 sequence
gtcagcaggatcgtatttgaccgcaaaagcacacgtgtgaaagtggagtatcacgggtgatttcttatgcgtttcgattgtcagcttttgcaatttggcggacttaattgcaaaaagtgataataagaacacaacaaaaaaccggcagtacagcaggagatttcctgttttgtactgccggttttctgcatagttatgccttatttacacttcccgaaaattatccacgctcacataccccgtgacatacttccctgccg

SEQ ID NO: 33192 - DNA, 109 bp, Unknown
  Description of Unknown: RightRegion for integrase B7193 sequence
gtcagcaggatcgtatttgaccgcaaaaacacgcgggtggaagtggagtatcacgggtgatttcttatgcgttttgattgtcagcttttacgatttggcggcccagacg

SEQ ID NO: 33193 - DNA, 260 bp, Unknown
  Description of Unknown: RightRegion for integrase B7194 sequence
tataaaaagaaaaaaactccaaaagatgattttgaagttgaaatttatctaaatatttagctctacaccaagaatgtagagctattttttatattattataaagagtgttctaaaatagaagaaaataaaaacacacatataaagacgcacgtagatacgtgtgccccaacaaatttatttatctttctattttccattaaataattctccttaatttctcttcttagtatcttatactaattatatcataaattaataa

SEQ ID NO: 33194 - DNA, 109 bp, Unknown
  Description of Unknown: RightRegion for integrase B7195 sequence
tataaaaagaaaaaaactccaaaagatgattttgaagttgaaatttatctaaatatttagctctacactaagaatgtagagctattttttatattattataaagagtgt

SEQ ID NO: 33195 - DNA, 260 bp, Unknown
  Description of Unknown: RightRegion for integrase B7196 sequence
gtagaccacatcacattcaaaaaaccggacaacacactggagatattctactacatttgacgaattttcagtcgcattttccgccacgaattgaaaaataagcgcgatttttggcttaacaccgtcattgactgtccatattttaactctatatctaaatgcaatacgggccgccgtactgactgatgataatggacgcagcgcggggatccgggttcttaatattgatggggtattgcaatttttttatataactaaac

SEQ ID NO: 33196 - DNA, 260 bp, Unknown
  Description of Unknown: RightRegion for integrase B7197 sequence
atcgactggggcaaaggcagatacggaaaaagggatatcaaagacattacttttttttgacctctgtttgtggttaattctagcaccgaacggtgcaagaattaactacaagcaaaaatagaggcgtgcatccatcgggtgcgcgtcttttttacattttcgtcataatcacagaatctattgacaatcatttggatttgtgcaatatagagacatcaaattctgtgtgaaggtggtcttaccatgtccgcgctcatctt

SEQ ID NO: 33197 - DNA, 260 bp, Unknown
  Description of Unknown: RightRegion for integrase B7198 sequence
atagatcatattgtttttaatagagcgagcggtacagtagacgttatttattataattaaatattatatctaaaatatgtatggcgggccatacgtttaaaagatatgtttttagcgcataataaatttatcgtttttttcttcaaccgcctgggcttctaaaagattcttgatttcgccgtagattatcatttgattatggattaatgtgtttaaattttcattgataacttcgagagaatcaagtaaatcctttttac

SEQ ID NO: 33198 - DNA, 260 bp, Unknown
  Description of Unknown: RightRegion for integrase B7199 sequence
tataaaaagaaaaaaactccaaaagatgattttgaagttgagatttatctaaatatttagctctacaccaagaatgtagagctattttttatattattataaagagtgttctaaaatagaagaaaataaaaacatacatataaagacgcacgtagatacgtgtgtcccaataaatttatttatctttctattttccattaaataattctccttaatttctcttcttagtatcttatactaattatctcataaattaataa

SEQ ID NO: 33199 - DNA, 260 bp, Unknown
  Description of Unknown: RightRegion for integrase B7200 sequence
gtagaccacatcacattcaaaaaaccggacaacacactggagatattctactatatttgatgggtttttagccgcattttccaccacgaattgaaaaacaagtgcgatttttggcttaacaccgtcatttactgtccatattttgactctatatctaaatgcaatacagtcctctttattgcatttagatataattaggtatagaaaaaggccgaacagtcttgtgaactgcccggccttttctcacatgagcattgtcg

SEQ ID NO: 33200 - DNA, 260 bp, Unknown
  Description of Unknown: RightRegion for integrase B7201 sequence
gtagaccacatcacattcaaaaaaccggacaacacactggagatattctactatatttgacggatttttagccgcattttctgccacgaattgaaaaataagtgcgatttttggcttaacaccgtcattgactgtccataattttactctatatctaaatgcaatacagtcctctttattgcatttagatataattaggtatagaaaaaggccgaacagtcttgtgaactgcccggccttttctcacatcagcacagctt

SEQ ID NO: 33201 - DNA, 260 bp, Unknown
  Description of Unknown: RightRegion for integrase B7202 sequence
tcttttattgatgttataactattgatggaaattataatattgacattaaatttttataattttttttgcacatttgcttgtactaagttactatcaccacctggttaatgttatttagtacaagcactaaaatagaaagaagtacagtaaaaattatttgtacttctttctgtatactattataatattattagatagttttttcggttctgttggccttattactatctggagcatttactgttgcagcagtagatgc

SEQ ID NO: 33202 - DNA, 260 bp, Unknown
  Description of Unknown: RightRegion for integrase B7203 sequence
ttaatatctaagatcacgatagacggcgatgacatcgcaataacttggacttttacctgaatttttggcaggggtgaacccatgtcctcaatttgggtaaaaaataaattgcgacaggggtattttcatgagcaaaattctttcagaaattgaactactttgcgataaggcggacggccttgccggtcttatctcgaccgtaaccgcggcagccagtaccacaggaatcgaccaccacgcgctcacaggtctttcatatt

SEQ ID NO: 33203 - DNA, 130 bp, Unknown
  Description of Unknown: RightRegion for integrase B7204 sequence
gttgaaaaagttgtctattctaagcctgatgacagcgtaagtatatttttttatctataactatacgcacatggagtacggaggtccgcatggcatgtgcgtataattttttatttttttgaaaaagctg

SEQ ID NO: 33204 - DNA, 260 bp, Unknown
  Description of Unknown: RightRegion for integrase B7205 sequence
tcttttatcgatgttataactattgatggaaattataatattgacattaaatttttataattttttttacacatttacttgtactaagttgctatcaccacctggttaatgttatttagtacaagcactaaaatagaaagaagtacattaaaaattatttgtacttctttctgtatactattataatattattagatagttttttcggttctgttggccttattactatctggagcatttactgttgcagcagtagatgc

SEQ ID NO: 33205 - DNA, 260 bp, Unknown
  Description of Unknown: RightRegion for integrase B7206 sequence
gtagaccacatcacattcaaaaagccggacaacacactggagatattctactatatttgatggatttttagccgcattttccgccacgaattgaaaaataagtgcgatttttggcttaacgccgtcattgtctgtccatattttgactctatatctaaatgcaatacagtccgccgtactgactgatgataatggacgcagcgcggggatccgggttcttaatattgatggggtattgcaatttttttatataactaaac

SEQ ID NO: 33206 - DNA, 260 bp, Unknown
  Description of Unknown: RightRegion for integrase B7207 sequence
atcaaaaatatcatagttgacggcagcagaatcacagtaaatttacggctcaaaaaataattcaacctaaaaaaagaggcttttttataataaaaacctctttttttcttgacaaatatatttaacggctctaaaatagaggtgaagctcagaaaaattgaatagtccattggcgcaataatgaagtaacgctataaatgttaacttcaatagggcgataaaatattatatcggaaacataagctcaatatcgaaatcca

SEQ ID NO: 33207 - DNA, 260 bp, Unknown
  Description of Unknown: RightRegion for integrase B7208 sequence
atagatcatattgtttttaatagagcgagcggtacagtagacgttatttattataattaaatattatatctaaaatatgtatggcggtctatacatttaaaagatatatttttaatgcataataaatttatcgattttttctttaatcccctgggcttctaaaagttttttgatttcaccgtagattatcatttgattatggattaatgtgtttaagttttcattgataacttcgagagaatcaagcaaatcctttttat

SEQ ID NO: 33208 - DNA, 260 bp, Unknown
  Description of Unknown: RightRegion for integrase B7209 sequence
atcgactggggcaaaggcagatacggaaaaagggatatcaaagacattacttttttttgacctctgtttgtggttaattctagcaccgaacggcgcaagaattaaccacaagcaaaaatagaggcgtgcatccatcgggtgcgcgtcttttttacattttcgtcaaaatcacagaatctattgacaatcatttggatttgtgcaatatagagatatcaaattctgtgtgaaggtggtcttaccatgtccgcgctcatctt

SEQ ID NO: 33209 - DNA, 260 bp, Unknown
  Description of Unknown: RightRegion for integrase B7210 sequence
atagatcatattgtttttaatagagcgagcggtacagtagacgttatttattataattaaatattatatctaaaatatgtatggcgggccatacatttaaaagatatgtttttagcgcataataaatttatcgtttttttcttcaaccgcctgggcttctaaaagtttcttgatttcgctgtagattatcatttgattatggattaatgtgtttaaattttcattgataacttcgagagaatcaagcaaatcctttttac

SEQ ID NO: 33210 - DNA, 260 bp, Unknown
  Description of Unknown: RightRegion for integrase B7211 sequence
ataatagatgaaatcgaaatggtaaatgattatagattctacatccatttaaaattttaggagcggctatgttaataataaaagagaaaattttggaaaaatattcaattttggaattaaaaaagatctttggaagttggttcttatattttaaaagaagtgattttaaaggcgagctgtataatataacctcttatttaactataaataatttggattattctcttgaagaatttaagaaagattatcccaaattatca

SEQ ID NO: 33211 - DNA, 244 bp, Unknown
  Description of Unknown: RightRegion for integrase B7212 sequence
attgacaggatcgtaatctatccggatcacatagatattcattggacctttacggcataaaaagaggaggcggtgtgatccgtctcctctttccttatggacttgcgctggcgcaattcccgtttttccttgtatttccggacttttttagtatcccatgcctgcctggggctgtgtcgaagtgtttgcaggctctttgatgttggcaacagctgcctcggtggtcaggaacgtagatgctaca

SEQ ID NO: 33212 - DNA, 260 bp, Unknown
  Description of Unknown: RightRegion for integrase B7213 sequence
gtagatcacatcacattcaaaaagccggacaacacactggagatattctactatatttgatggattttcagtcgcattttccgccacgaattgaaaaacaagtgcgatttttggcttaacgccgtcattgattgtccatattttgactctatatctaaatgcaatacagtcctctttattgcatttagatataattagcgtagaaaaaggccgaacagtcttgtgaaccgcccggccttttctcacatgagcattgtcga

SEQ ID NO: 33213 - DNA, 260 bp, Unknown
  Description of Unknown: RightRegion for integrase B7214 sequence
gtagaccacatcacattcaaaaagccggacaacacactggagatattctactatatttgatggatttttagccacattttccgccacgaattgaaaaacaagtgcgatttttggcttaacaccgtcatttactgtccatattttgactctatatctaaatgcaatacagtcctctttattgcatttagatataattaggtatagaaaaaggccgaacagtcttgtgaactgcccggccttttctcacatgagcattgtcg

SEQ ID NO: 33214 - DNA, 260 bp, Unknown
  Description of Unknown: RightRegion for integrase B7215 sequence
gtagatcacatcacattcaaaaaaccggacaacacactggagatattctactatatttgatggatttttagccgcattttccgccacgaattgaaaaataagtgcgatttttggcttaacaccgtcattgcctgtccatattttgactctatatctaaatgcaatacagtcctctttattgcatttagatataattggtatagaaaaaggccgaacagtcttgtgaactacccggcctttttttacatcagcattgtcga

SEQ ID NO: 33215 - DNA, 260 bp, Unknown
  Description of Unknown: RightRegion for integrase B7216 sequence
tacgacaaagagaatgatacactaatcttccacctctacactcccagaaaagccgcataaacagcggctttgagggacttctaggttacagggataagggggtccttacatcagtaacctagatgtgtgtttttatctatataataagatgatacaatattccctcccagattgccagtctgggaggatttttcttttattttaccctaattttctgcccagcataaatcttatttggatttgcaataccgttcatctgt

SEQ ID NO: 33216 - DNA, 260 bp, Unknown
  Description of Unknown: RightRegion for integrase B7217 sequence
atcgactggggcaaaggcagatacggaaaaagggatatcaaagacattacttttttttgacttctgtttgtggttaattctagcaccgaatggtgcaagaattaactacaatcaaaaatagaggcgtgcatccatcgggtgcgcgtcttttttacatttttgtcataatcacagaatctattgacaatcatttggatttgtgcaatatagagatatcaaattctgtgtgaaggtggtcttaccatgtccgcgctcatctt

SEQ ID NO: 33217 - DNA, 260 bp, Unknown
  Description of Unknown: RightRegion for integrase B7218 sequence
actttaatcgatagaattacagttacaggtgatgatgtaagaatagattggactttttaaaaattattaccaattagttgcaatgatggtgataactgtcccaccagccaataataacccttttaaactgttctccattcctctcttactacaacatcttttcccctaacgttatgttcaaaaatgttgcttttcctcccttcttgttttctttatttttctttatcatttattaactgcaggatttaaaagaatagttt

SEQ ID NO: 33218 - DNA, 260 bp, Unknown
  Description of Unknown: RightRegion for integrase B7219 sequence
gtagaccacatcacattcaaaaaaccggacaacacactggagatattctactacatttgacgaatttttagccgcatttttcgccacgaattgaaaaataagtgcgatttttgccttaacaccgtcattgactgtccatattttgactctatatctaaatgcaatacagtccgccgtactgactgatgataatggacgcagcgcggggatccgggttcttaatattgatggggtattgcaatttttttatataactaaac

SEQ ID NO: 33219 - DNA, 260 bp, Unknown; identical to SEQ ID NO: 33210
  Description of Unknown: RightRegion for integrase B7220 sequence

SEQ ID NO: 33220 - DNA, 260 bp, Unknown
  Description of Unknown: RightRegion for integrase B7221 sequence
atcgactggggtaaaggcagatacggaaaaagggatatcaaggacattacttttttttgacctctgtttgtggttaattctagcaccgaacggcgcaagaattaactacaagcaaaaatagaggcgtgcatccatcgggtgcgcgtcttttttacattttcgtcataatttgtaattctattgacaatttcaaaataatgtgcatgatatattgcagatacaaaatattccactattgggaggcaacgcaaatgaaagtt

SEQ ID NO: 33221 - DNA, 260 bp, Unknown
  Description of Unknown: RightRegion for integrase B7222 sequence
gtagatcacatcacattcaaaaaaccggacaacacactggagatattctactatatttgatggattttcaaccgcattttccgccacgaattgaaaaataagtgcgatttttggcttaacaccgtcatttactgtccatattttgactctatatctaaatgcaatacagtccgccgtactgactgatgataatggatgcagcgcggggatccgggtttttaatattgatggggtattgcaatttctttatataactaaac

SEQ ID NO: 33222 - DNA, 260 bp, Unknown
  Description of Unknown: RightRegion for integrase B7223 sequence
tatgacaaagaaagcgacaccctgaccttccgcctctacagccctaagaaagccgcataaacagcggctttggggcacttataggttacgggagtaagggggcccagacccccgtaacctagaagtgggttgttatctattaaaatgcaatgtttataataggatgatacaatattattccccggttggcaaccggggaatctgtttacaatttatttattatctgctatacttcttttagtggagagcggtggcaagcc

SEQ ID NO: 33223 - DNA, 260 bp, Unknown
  Description of Unknown: RightRegion for integrase B7224 sequence
tataaaaagaaaaaaactccaaaagatgattttgaagttgagatttatctaaatatttagctctacaccaagaatgtagagctattttttatattattataaagagtgttctaaaatagaagaaaataaaaacatacatataaagacgcacgtagatacgtgtgccccaataaatttatttatctttctattttccattaaataattctccttaatttctcttcttagtatcttatactaattatatcataaattaataa

SEQ ID NO: 33224 - DNA, 260 bp, Unknown
  Description of Unknown: RightRegion for integrase B7225 sequence
ctctctcgtatcgtatacgaaaagaagaagcaaaacctcgccctttatttttacatctgattataaccactatttgcagtctggaccgccgtattgtgagataatgaatttcgcaagcgccggattcgggtttgcgatttttaccgggtattgcagcttcttctcatatacaaacatatttagccctccatacccgctttatagtcccacggccacgggtttttgagccatgtatatgacttgcactgacttacgtcaca

SEQ ID NO: 33225 - DNA, 260 bp, Unknown
  Description of Unknown: RightRegion for integrase B7226 sequence
ctgaaatgcatcgttttcgaccggaagaccgagcattttgattttcaatattatgcatgattatgcatgaaatagcggagaaccttgaaaaataaggctctccgcttattataggttactgcactttagaccgccatactggctcattatatattgcgcgatcttcggattcggcgtcttgatattgactggatattgtaatcttttttcatatctccacatacgctacacctccccttcccacggccagcgctctgtaa

SEQ ID NO: 33226 - DNA, 260 bp, Unknown
  Description of Unknown: RightRegion for integrase B7227 sequence
gtagaccacatcacattcaaaaaaccggacaacacactggagatattctactatatttgatggattttcagtcgcattttccgccacgaattgaaaaacaagtgcgatttttggcttaacgccgtcattgattgtccgtattttgactctatatctaaatgcaatacaggcctctttattgcatttagatataattaggtatagaaaaaggccgaacagtcttgtgactgcccggccttttctcacatgagcattgtcga

SEQ ID NO: 33227 - DNA, 260 bp, Unknown
  Description of Unknown: RightRegion for integrase B7228 sequence
attacgcgaatccagcgtcccgacgggtactggattgaaatagtaaaagagaaagaatgattatataaattattacgcaaaaattacgaaaagagcctccggcgtttaatcgccagaggctcttttgtgttctcatagcccaacactcccgccatcggggaaagaaaagccaatttttgctgtcgcgcccaacgcattagctatacgctgccactcatcaaccgtaaacttgccagtgttcagacgcttgttgagaagtt

SEQ ID NO: 33228 - DNA, 109 bp, Unknown
  Description of Unknown: RightRegion for integrase B7229 sequence
gtcagtaagattgtatttgaccgcaaaaacacacgtgtggaagtggaatatcacgggtgatttttttatgcagtccggttatcagcttttgcagcttggcggcccagac

SEQ ID NO: 33229 - DNA, 260 bp, Unknown
  Description of Unknown: RightRegion for integrase B7230 sequence
ttgatagaaaaaatagtgataaaaggcgaggatataaagatatattggaggtttgtctaattctgcccccaaacataacgcagttttgttactgagtcatgcaaaattgatattcttaaattatccgtttctgcctcaagtaatgggttattcttattaaattgtacgttcattaaattgcttattcttgtataaaactgctgaataaaattatcgtctaatgtaaagcctttaattttataccttcccttatttaaatc

SEQ ID NO: 33230 - DNA, 260 bp, Unknown
  Description of Unknown: RightRegion for integrase B7231 sequence
gagaaaatcgtcttcgaccgtccgcacaatgcccttcattacttctatcgctactcgtaaacacacgtttttccgtggttttcggaaatcatatgttactggcatacggtggactgtataccagtaacatatgattttctgcatttcgcccttttacttttttatatattattctattgacaaaccagataaaaatcgtttatcatgcaactaaagagtagttgcatgataaggaggtgtgaattttgaagtatgagtaa

SEQ ID NO: 33231 - DNA, 260 bp, Unknown
  Description of Unknown: RightRegion for integrase B7232 sequence
gtagatcacatcacattcaaaaagccggacaacacactggagatattctactatatttgatggatttttagccgcattttccgccacgaattgaaaaataagtgcgatttttggcttaacgccgtcattgattgtccatatttttactctgtatctaaatgcaatacaggccgccgtactgactgatgataatggacgcagcgcggggatccggattcttaatattgatggggtattgcaatttttttatataactaaac

SEQ ID NO: 33232 - DNA, 260 bp, Unknown
  Description of Unknown: RightRegion for integrase B7233 sequence
gtagaccacatcacattcaaaaaaccggacaacacactggagatattctactacatttgacgaattttcagtcgcattttccgccacgaattgaaaaataagcgcgatttttggcttaacaccgtcattgactgtccatattttaactctatatctaaatgcaatacgggccgccgtactgactgatgataatggacgcagcgcggggatccgggttcttaatattgatggggtattgcaatttctttatataactaaac

SEQ ID NO: 33233 - DNA, 260 bp, Unknown
  Description of Unknown: RightRegion for integrase B7234 sequence
gtagatcacatcacattcaaaaaaccggacaacacactggagatattctactatatttgacggatttttagccgcattttctgccacgaattgaaaaataagtgcgatttttggcttaacaccgtcattgactgtccataattttactctatatctaaatgcaatacagtccgccgtactgactgatgataatggaggcagcgcggggatccgggttcttaatattgatggggtattgcaatttttttatataactaaac

SEQ ID NO: 33234 - DNA, 260 bp, Unknown; identical to SEQ ID NO: 33210
  Description of Unknown: RightRegion for integrase B7235 sequence

SEQ ID NO: 33235 - DNA, 86 bp, Unknown
  Description of Unknown: RightRegion for integrase B7236 sequence
atagatcatattgtttttaatagagcgagcggtacagtagacgttatttattataattaaatattatatctaaaatatgtatggcg

SEQ ID NO: 33236 - DNA, 260 bp, Unknown
  Description of Unknown: RightRegion for integrase B7237 sequence
gtagaccacatcacattcaaaaaaccggacaacacactggagatattctactatatttgatggaattttagccgcattttccgccacgaattgaaaaataagtgcgatttttggcttgacaccgtcattgactgtccatattttaactctatatctaaatgcaatacgggcctctttattgcatttagatataattagcgtagaaaaaggccgaacagtcttgtgaactgcccggccttttctcacatgagcattgtcga

SEQ ID NO: 33237 - DNA, 108 bp, Unknown
  Description of Unknown: RightRegion for integrase B7238 sequence
gaaagaagtgatgaatggcaagcttatgaattaaaaattgtagaaatggagtttaattgatggtatattgaattaaacttctttttatgtattacaagaggttttgcc

SEQ ID NO: 33238 - DNA, 109 bp, Unknown
  Description of Unknown: RightRegion for integrase B7239 sequence
atagatcatattgtttttaatagagcgagcggtacagtagacgttatttattataattaaatattatatctaaaatatgtatggcgggcctgacggcgaattaggagct

SEQ ID NO: 33239 - DNA, 260 bp, Unknown
  Description of Unknown: RightRegion for integrase B7240 sequence
gtagatcacatcacattcaaaaaaccggacaacacactggagatattctactatatttgatggattttcagccgcattttccgccatgaattgaaaaacaagtgcgatttttgacttaacaccgtcattcactgtccatattttgactctatatctaaatgcaatacaggccgccgtactgactgatgataatggacgcagcgcggggatccgggttcttaatattgatggggtattgcaatttttttatataactaaac

SEQ ID NO: 33240 - DNA, 260 bp, Unknown
  Description of Unknown: RightRegion for integrase B7241 sequence
tatgacaaagaaagtgacaccctgaccttccgcctctacagccctaagaaagccgcataaacagcggctttggggcacttataggttacgggagtaagggggccctgacggagaaatgggcgcctccatgcgatatctgtcccagcgattcgccatgaccaaccggatagctatgggaacattgacggatatcggaaccgaagaattggggcatttggaaatggtagccaccattgttcaccagcttacccgcaacctct

SEQ ID NO: 33241 - DNA, 260 bp, Unknown
  Description of Unknown: RightRegion for integrase B7242 sequence
tataaaaagaaaaaaactccaaaagatgattttgaagttgaaatttatctaaatatttagctctacaccaagaatgtagagctattttttatattattataaagagtgttctaaaatagaagaaaataaaaacatacatataaagacgcacgtagatacgtgtgccccaataaatttatttatctttctattttccattaaataattctccttaatttctcttcttagtatcttatactaattatatcataaattaataa

SEQ ID NO: 33242 - DNA, 260 bp, Unknown
  Description of Unknown: RightRegion for integrase B7243 sequence
tataaaaagaaaaaaactccaaaagatgattttgaagttgaaatttatctaaatatttagctctacactaagaatgtagagctattttttatattattataaagagtgttctaaaatagaagaaaataaaaacatacatataaagacgcacgtagatacgtgtgccccaataaatttatttatctttctattttccattaaataattctccttaatttctcttcttagtatcttatactaattatatcataaattaataa

SEQ ID NO: 33243 - DNA, 260 bp, Unknown
  Description of Unknown: RightRegion for integrase B7244 sequence
gagctgattgaaactatatatattgacggaaaggaggtttctattaactggcgcatctgattacaaatttgtatatgctatacaaattatatatacatttttgtaatcatcttaaaattcttatactcaacaactattactttattacgcagaatatagccatggtaataaatacttgttgaaataaggcaaaaaatggaatattctgtagaagcagaggagaatggaaaatgataaagaaacgcaaaccaagtgcaaac

SEQ ID NO: 33244 - DNA, 260 bp, Unknown
  Description of Unknown: RightRegion for integrase B7245 sequence
tataaaaagaaaaaaactccaaaagatgattttgaagttgaaatttatctaaatatttagctctacaccaagaatgtagagctattttttatattattataaagagtgttctaaaatagaagaaaataaaaacatacatataaagacgcacgtagatacgtgtgtcccaataaatttatttatctttctattttccattaaataattctccttaatttcttttcttagtatcttatactaattatatcataaattaataa

SEQ ID NO: 33245 - DNA, 260 bp, Unknown
  Description of Unknown: RightRegion for integrase B7246 sequence
gatcgtatcgtctatgaaaaggcttccggaaccatgtatttcgactttttcgtttcctgatttttgttccgaaagtccgcaaacccgcataaacactggatttttccgtatcatctggtacggaactccgggccaccatactgactcatgataatttgggcgattttggggtttggtgtcgtgatgtttacaggatactcgaggcgtttttcataattccacatccgtcagcaccctcctttccggttgacttcccacgg

SEQ ID NO: 33246 - DNA, 260 bp, Unknown
  Description of Unknown: RightRegion for integrase B7247 sequence
gtagatcacatcacattcaaaaagccggacaacacactggagatattctactatatttgatggatttttagccgcattttccgccacgaattgaaaaataagtgcgatttttggcttaacaccgtcattgactgtccgtattttgactctatatctaaatgcaatacaggcctctttattgcatttagatataattaggtatagaaaaaggccgaacagtcttgtgaactgcccggccttttctcacatgagcattgtcg

SEQ ID NO: 33247 - DNA, 260 bp, Unknown; identical to SEQ ID NO: 33210
  Description of Unknown: RightRegion for integrase B7248 sequence

SEQ ID NO: 33248 - DNA, 260 bp, Unknown
  Description of Unknown: RightRegion for integrase B7249 sequence
gagaaaatcgtcttcgaccgtccgcacaatgcccttcactacttctaccactattcgtaaagccgcgctttcccgtggctttccaaaatcatatgttactggtgtatggtggactgtataccagtaacatataattttctgcttttcgcccttttacttttttatatattattctattgacaaaccagataaaaatcgtttatcatgcaactaaagagtagttgcatgataaggaggtgtgaattttgaagtatgagtaa

SEQ ID NO: 33249 - DNA, 260 bp, Unknown
  Description of Unknown: RightRegion for integrase B7250 sequence
gcagttgtaactagggatggcgaacaggaaatgttaagaaaacgaatcgatgagatgtgacagttcctgcagacacagacaaatcgaattacagagtacgatgaacagatggtcagaaggcttattgagaagattacggtctttgatgataagcttatctttgaattcaaatccggcatgacacttgaacttaagagataattgaaggaataaaactatacagacaccttgcagcgatgcagggtgtttttttcgttcat

SEQ ID NO: 33250 - DNA, 260 bp, Unknown
  Description of Unknown: RightRegion for integrase B7251 sequence
gtagatcacatcacattcaaaaagccggacaacacactggagatattctactatatttgatggatttttagccgcattttccgccacgaattgaaaaataagtgcgatttttggcttaacgccgtcattgattgtccatatttttactctgtatctaaatgcaatacaggcctctttattgcatttagatataattagtatagataaaggccgaacagtcttgtaaactgcccggccttttctcacatcagcattgtcga

SEQ ID NO: 33251 - DNA, 260 bp, Unknown
  Description of Unknown: RightRegion for integrase B7252 sequence
atcgactggggcaaaggcagatacggaaaaagggatatcaaagacattacttttttttgacttctgtttgtggttaattttagcaccgaacggcgcaagaattaactacaagcaaaaatagaggcgtgcatccatcgggtgcgcgtcttttttacattttcgtcataatcacagaatctattgacaatcatttggatttgtgcaatatagagatatcaaattctgtgtgaaggtggtcttaccatgtccgcgctcatctt

SEQ ID NO: 33252 - DNA, 109 bp, Unknown; identical to SEQ ID NO: 33192
  Description of Unknown: RightRegion for integrase B7253 sequence

SEQ ID NO: 33253 - DNA, 260 bp, Unknown
  Description of Unknown: RightRegion for integrase B7254 sequence
attgaaaaaatccttgttgacccccgcaataaaactatggacatttatttttttgcctaacggtgtaacaacctgtactgatagcacatacagtacaggttgttacattatttgtacttatgcgtgaagccctttattttcaaggctttctgtcttcaaaatccatcaattcacgaatatcatttacttgcaaggcttccgctatccgtgccagatgttcaaagtttaaaacagttttgctttcacgcactatttcacta

SEQ ID NO: 33254 - DNA, 260 bp, Unknown
  Description of Unknown: RightRegion for integrase B7255 sequence
atcagcaagatagtatatactaaatccaatgaagaaatcgagatgtactactatatgtagtgcatctccttttgcaatatggtggacccgatggcgaattgggcgccagcctgcgctacctttcgcagaaatttgccatgcccaaccgccgggtcgccggtctcctcaatgatattggcaccgaggagctggctcatctggagatgatcggcaccatcgtccaccagctcaccaggaatctctccatcgaagagatcaaa

SEQ ID NO: 33255 - DNA, 260 bp, Unknown
  Description of Unknown: RightRegion for integrase B7256 sequence
tttattacgcgaatccagcaaccggacgggtactggatcgagatcgtgccggaaaaatgagcctgcgcatgggggagacgcgaaagcgcctccccatttttgcgccggaggcaggggctgcgtggttgcattttgcttgaaaatgatgtaaattggaaggcgtaggaaacaggagggggacggatatgggattcttaaggagcaaaaaggggagcattatcagcgattatttctgcgctgcagacgacatcgggccgttt

SEQ ID NO: 33256 - DNA, 260 bp, Unknown
  Description of Unknown: RightRegion for integrase B7257 sequence
ccaccaaagagagaacaggttgaagcatttatgtctaatgtaggggaagtgtctttgtagccttgcccgaattgtaccatcgtgaaaccaagcccctccagattttgcgacatctgcactgcaccccagcggtcaaatgcaatttctttgatgtgaaacttctgtcccagttcatcgatgaagttttcgataaaaccgtagtgaaccacatttccctcagtcgttttcaggtagccttgccgttcccatacatcatatgg

SEQ ID NO: 33257 - DNA, 109 bp, Unknown
  Description of Unknown: RightRegion for integrase B7258 sequence
ttgaaatgcatcattttcgatcggaagaccgagcattttgattttcaatattatgcatgaaatagcggagaaccttgaaaaataaggctctccgcttattataggttac

SEQ ID NO: 33258 - DNA, 260 bp, Unknown
  Description of Unknown: RightRegion for integrase B7259 sequence
cagctaattaaaagtattgatgtaactaatgaagagttgactatcaattggaatatttaactctttttgaatagttttagagagtgtcatttcaagcaaggtgaagcctgattgttttttctttaaaattttcattaataaactccttggaatgaatgataaattggcaataagatactaagatataaaataacaattatgattgcaataatgctaaagataactggttgaacaaaaatcaataaatgttcaattgcagt

SEQ ID NO: 33259 - DNA, 260 bp, Unknown
  Description of Unknown: RightRegion for integrase B7260 sequence
gacggaatcacctatgataaggagaaaaaacggctgtattttaactttttcatttcatgaaaaaacgccggaagccccattttataagggcttccggcgatttgtagggtattgcaatcggggccaccggagttcaatagcctatataggttttcttttaataggaagaaactcttttcaaatttatatgttttttgagatgatacaatatttttctacccggtagctgccaactaccgggtagattttaatacttctgc

SEQ ID NO: 33260 - DNA, 109 bp, Unknown
  Description of Unknown: RightRegion for integrase B7261 sequence
atttccaaaattgtctttaataaagccaaaaattcactcgatttgtttttttacttgtagtgtcgtatgttttagcaatacggcggacctgacggcgaattaggagcaa

SEQ ID NO: 33261 - DNA, 260 bp, Unknown
  Description of Unknown: RightRegion for integrase B7262 sequence
ccaccaaagagagaacaggttgaagcatttatgtctaatgtaggggaagtgtctttgtaaccctgcccgaactgcaccatcgtaaaaccaagcccctccagattctgtgacatctgcaccgcaccccaacggtcgaaagcaatctctttgatgtgaaatttctgccccagttcatcgatgaaattttcgataaaaccgtagtgaaccacattcccctcagtggttttcagaaagccttgccgttcccatacatcataagg

SEQ ID NO: 33262 - DNA, 109 bp, Unknown
  Description of Unknown: RightRegion for integrase B7263 sequence
gatcgtatcgtctatgaaaaggcttccgggacgatgtatttcgactttttcgtctcctgatttttttccgaaagtccgcaaacccgcataaacactcaatgtcattaac

SEQ ID NO: 33263 - DNA, 109 bp, Unknown
  Description of Unknown: RightRegion for integrase B7264 sequence
ttgaaatgcatcgttttcgaccggaagaccgagcattttgattttcaatattatgcatgaaatagcggagaaccttgaaaaataaggctctccgcttattataggttac

SEQ ID NO: 33264 - DNA, 240 bp, Unknown
  Description of Unknown: RightRegion for integrase B7265 sequence
gatagtattgtgtacaataaggattccggaactatgttttttgatttttttgtttcttgattttccggcaaaaaagcccggaaacccgcataaatactgaggttttgggcttatcatctggtattaccatccgggccaccatactgactcatgataatttgggcgattttggggtttggtgtcgtaatgtttacaggatactcgaggcgtttttcataattccacatccgtcagcaccct

SEQ ID NO: 33265 - DNA, 260 bp, Unknown
  Description of Unknown: RightRegion for integrase B7266 sequence
ttgaaatgcatcgttttcgaccggaagaccgagcattttgattttcaatattatgcatgaaatagcggagaaccttgaaaaataaggctctccgcttatcataggttactgcactttagaccgccatactggctcattacatattgcgcgatcttcggattcggcgtcttgatattgactggatattgtaatcttttttcatatctccacatacgctacacctccccttcccacggccagcgctctgtaagccaggacca

SEQ ID NO: 33266 - DNA, 260 bp, Unknown
  Description of Unknown: RightRegion for integrase B7267 sequence
ccaccaaagagagaacaggttgaagcatttatgtctaatgtaggggaagtgtctttataaccctgtccaaattgcaccatcgtgaatccaagtccttccaaattctgtgacatctgcactgcaccccagcggtcaaatgcaatttctttgatgtgaaatttctgccccagttcatcgatgaaattctcaataaaaccatagtgaaccacatttccctcagtcgttttcaagtagccttgccgttcccatatatcatatgg

SEQ ID NO: 33267 - DNA, 260 bp, Unknown
  Description of Unknown: RightRegion for integrase B7268 sequence
ggatattacacgaacacctactttttcaaaggcggctttgccgtaagggtgtggctgtgatgtcataaaacacaaaacgaggtttaaggcacgatgtgccctgaacctcgttttttatatgctcgtgccttatttggattcggtgtccaatcataataggcagatcaccgcaagcaatgcgagtgttcatatacactcacatcctctgcttgttgggtgctatacccccgctggacacagaatttattctgtggctgcgc

SEQ ID NO: 33268 - DNA, 138 bp, Unknown
  Description of Unknown: RightRegion for integrase B7269 sequence
gatcgtatcgtctatgaaaaagcttccgggaccatgtatttcgactttttcgtttcctgatttttgttccgaaagtccgtaaacccgcataaacactggattttttcgtatcatctggtacggaactccggtccaccg

SEQ ID NO: 33269 - DNA, 234 bp, Unknown
  Description of Unknown: RightRegion for integrase B7270 sequence
gatcgtatcgtctatgaaaaggcttccggaaccatgtatttcgactttttcgtctcctgatttttttccgaaagtccgcaaacccgcataaacactggatttttccgtatcatctggtacggaactccgggccaccgtactgactcatgataatttgggcgattttggggtttggtgttgtgatgtttacaggatactcgaggcgtttttcataattccacatccgtcagcacc

SEQ ID NO: 33270 - DNA, 260 bp, Unknown
  Description of Unknown: RightRegion for integrase B7271 sequence
gacgggattacctacgataaggagaaaaataggctgtattttaactttttcatttcatgaaaaaacgccgggaagccccattttataagggtttccggcgatttgtagggtattgcaatcggggccaccgtattgtgatgcaataatcttcgcgatccctgcatccgtttttgtgatatttaccggatattgcaatcgtttttcatatatccacatacactaacacctgcctttcccggatctttcccatggccatggct

SEQ ID NO: 33271 - DNA, 260 bp, Unknown; identical to SEQ ID NO: 33270
  Description of Unknown: RightRegion for integrase B7272 sequence

SEQ ID NO: 33272 - DNA, 260 bp, Unknown
  Description of Unknown: RightRegion for integrase B7273 sequence
ctgaaatgcattgttttcgaccggaagaccgagcattttgattttcaatattatgcatgaaatagcggagaaccttgaaaaataaggctctccgcttattataggttactgcactttagaccgccgtactggctcattatatattgcgcgatcttcgggttcggtgtcttgatattgaccggatactgtaatcttttttcatatctccacatacgctacacctccccttcccacggccagcgctctgtgagccaggacca

SEQ ID NO: 33273 - DNA, 260 bp, Unknown
  Description of Unknown: RightRegion for integrase B7274 sequence
ttgaaatgcatcgttttcgaccggaagaccgagcattttgattttcaatattatgcatgaaatagcggagaaccttgaaaaataaggctctccgcttattataggttactgcactttagaccgccatactggctcattacatattgcgcgatcttcggattcggcgtcttgatattgactggatattgtaatcttttttcatatctccacatacgctacacctccccttcccacggccagcgctctgtaagccaggacca

SEQ ID NO: 33274 - DNA, 260 bp, Unknown
  Description of Unknown: RightRegion for integrase B7275 sequence
gacggaatcacctatgataaggagaaaaaccggttgtattttaactttttcatttcataaaaaacgccgggaagccccattttataagggtttccggcaatttgtagggtattgcaatccgggccaccgtattgtgatgcaataatcttcgcgatccgtgcatccgttttcgtgatatttaccggatattgcaatcgtttttcatatatccacatacactaacacctgcctttcccggatctttcccatggccatggctg

SEQ ID NO: 33275 - DNA, 260 bp, Unknown
  Description of Unknown: RightRegion for integrase B7276 sequence
gatcgtatcgtctacgaaaaggcttctggaaccatgtatttcgactttttcgtctcctgattttttttccgaaagtccgcaaacccgcataaacactggatttttccgtatcatctggtacggaactccggtccaccgtactgactcatgataatttgggcgattttagggtttggtgtcgtgatgtttacaggatactcgaggcgtttttcataattccacatccgtcagcaccctcctttccggttgacttcccacgg

SEQ ID NO: 33276 - DNA, 260 bp, Unknown
  Description of Unknown: RightRegion for integrase B7277 sequence
aatttaattattaaaaaaattgaagttttttctttagataaaataaatataatattttaaaaaggtaaatcaacactacttttgatttacctttttaatttaaattttcaataaattttcttttctcttctagcaaaaactctttataacctatatattcttcatcagaaggattaatatatataataaagttacattctccaattaacctatctaaatgatactttatattttctatttctccattcttctcttttata

SEQ ID NO: 33277 - DNA, 260 bp, Unknown
  Description of Unknown: RightRegion for integrase B7278 sequence
ttgaaatgcatcgttttcgaccggaagaccgagcattttgattttcaatattatgcatgaaatagcggagaaccttgaaaaataaggctctccgcttattataggttattgcactttagaccgccgtactggctcattatatattgcgcgatcttcggattcggcgtcttgatattgactggatattgtaatcttttttcatatctccacatatgctacacctccccttcccacggccagcgctctgtaagccaggacca

SEQ ID NO: 33278 - DNA, 109 bp, Unknown
  Description of Unknown: RightRegion for integrase B7279 sequence
gatcgtatcgtctatgaaaaatcttctggaacgatgtattttgacttttttgtttcttgattttccatcccgaaaagctcgcaaacccgcataaatactggcttttctg

SEQ ID NO: 33279 - DNA, 139 bp, Unknown
  Description of Unknown: RightRegion for integrase B7280 sequence
ccaccaaagagagaacaggttgaagcgtttatgtctaatgtaggggaagtatctttgtagccttgcccgaattgtaccatcgtgaatccaagtccctccagattctgtgacatctgcactgcaccccaacggtcaaaag

SEQ ID NO: 33280 - DNA, 260 bp, Unknown
  Description of Unknown: RightRegion for integrase B7281 sequence
aatttaattataaaaaaaattgaagtttcttctttagataaaataaacataatattttaaaaaggactatatacatttagtaaatgtagtccttttttattaaataactttctagttttttctaaatttttaaacttctttttattcttaaaatgaggatgccatctataaaaatattttttcactttcctctatctcttttctataatattgaactaatgcatgagtttgaattctttttaaagaaactttttcgccca

SEQ ID NO: 33281 - DNA, 260 bp, Unknown
  Description of Unknown: RightRegion for integrase B7282 sequence
tttattacgcgaatccagcgtccagacggttactggatcgagatcgtaccggaaaagtgaacagcgcatcaaacacagaagccgcttcctgacttctgtgtttttttggtaaaccgattgacaaatacaggcacatacgttattctggagctggaagcgaaatggaatttgcacgttcttcagaaaggagcgaccgaatatgacgcgaagaaaacgactctgcctgctgctggcggtgctgacgctgctgctggcgctga

SEQ ID NO: 33282 - DNA, 260 bp, Unknown
  Description of Unknown: RightRegion for integrase B7283 sequence
atttcttatatcatctttgaccgcgcagcaaccaccttcaatatagttttccatttttaaggcgagacagccgctcccgcagctccgttgtctatagccttaaaaaattatatctaaaagcactaagctccgccgtactgcttttagatataataaatcgccgctttatgctttgctttttagtatagcacaaggcggcgattatttcaaatgttaaattctatccaggatgaacacggcgagatacagcagcacaagtc

SEQ ID NO: 33283 - DNA, 260 bp, Unknown
  Description of Unknown: RightRegion for integrase B7284 sequence
cgtaaggcaatccataatcaaagattagaagtattagagaaacaaatagaagacctctaatatgctattccagaaaaagaagaatatgaggagaagctaatacttgtgtcagatgctcttatggtgatccaagatgattacttagatgcagctactaaaaatgaatccctcaagcaaataatcagtagaattgaattcagtcgtgaaaatgatgtagaatttatattagacatagacctacaccaataaagtgtgggtta

SEQ ID NO: 33284 - DNA, 260 bp, Unknown
  Description of Unknown: RightRegion for integrase B7285 sequence
ccaccaaagagagaacaggttgaagcgtttatgtctaatgtaggggaagtatctttgtaaccctgaccgaactgaaccatcgtgaatccaagtccctccagattctgtgacatctgcaccgcaccccaacggtcaaaagcaatttctttgatatggaatttctgccccagttcatcgatgaagttttcgataaagccatagtggacaacattgccctccgttgttttcagataaccctgctgctcccacacatcataggg

SEQ ID NO: 33285 - DNA, 260 bp, Unknown
  Description of Unknown: RightRegion for integrase B7286 sequence
gatcgtatcgtctatgaaaaggcttccggaaccatgtatttcgactttttcgtctcctgattttttttcgaaagtccgcaaacccgcataaacactggatttttccgtatcatctggtacggaactccgggccaccgtactgactcatgataatttgggcgattttggggtttggtgtcgtgatgtttacaggatactcgaggcgtttttcataattccacatccgtcagcaccctcctttccggttgacttcccacggc

SEQ ID NO: 33286 - DNA, 260 bp, Unknown
  Description of Unknown: RightRegion for integrase B7287 sequence
ccaccaaagagagaacaggttgaagcatttatgtctaatgtaggggaagtatccttgtagccctgcccgaactgcacaagagtaaatccaagttcctccaaattctgcgacatctgcaccgcaccccatctatcaaaagcaatctctttgatgtggaatttctgtcccagttcatcaatgaagttttcgataaaaccatagtggacaacattgccctcagtagttttcagataaccttgccgttcccatacatcataggg

SEQ ID NO: 33287 - DNA, 260 bp, Unknown
  Description of Unknown: RightRegion for integrase B7288 sequence
gatcgtatcgtctatgaaaaatcttctggaacgatgtattttgacttttttgtttcttgattttccatcccgaaaagctcgcaaacccgcataaatactggcttttctggcttatcatctggtattgaactccggtccaccatactgactcatgataatttgggcgattttggggtttggtgtcgtgatgtttacaggatactcgaggcgtttttcataattccacatccgtcagcaccctcctttccggttgacttccc

SEQ ID NO: 33288 - DNA, 260 bp, Unknown
  Description of Unknown: RightRegion for integrase B7289 sequence
ttgaaatgcatcgttttcgaccggaagaccgagcattttgattttcaatattatgcatgattatgcatgaaatagcggagaaccttgaaaaataaggctctccgcttattataggttactgcactttagaccgccgtactggctcattatatattgcgcgatcttcggattcggcgtcttgatattgactggatattgtaatcttttttcatatctccacatatgctacacctccccttcccacggccagcgctctgtaa

SEQ ID NO: 33289 - DNA, 109 bp, Unknown
  Description of Unknown: RightRegion for integrase B7290 sequence
atttcttatatcatctttgaccgcgcagcaaccaccttcaatatagttttccatttttaaggcgagacagccgctcccgcagctccgttgtctatgccttaaaaaatta

SEQ ID NO: 33290 - DNA, 260 bp, Unknown
  Description of Unknown: RightRegion for integrase B7291 sequence
gatcgtatcgtctatgaaaaatcttctggaacgatgtattttgacttttttgtttcttgattttccatcccgaaaagcccgcaaacccgcataaatactggcttttctggcttatcatctggtattgaactccgggccaccgtactgactcatgataatttgggcgattttggggtttggtgtcgtgatgtttacaggatactcgaggcgtttttcataattccacatccgtcagcaccctcctttccggttgacttccc

SEQ ID NO: 33291 - DNA, 260 bp, Unknown
  Description of Unknown: RightRegion for integrase B7292 sequence
ccaccaaagagagaacaggttgaagcgtttatgtctaatgtaggggaagtatctttgtagccttgcccgaactgaaccattgtaaatccaagcccctccagattttgcgacatctgcactgcaccccagcggtcaaatgcaatttctttgatgtgaaatttctgccccagttcatcgatgaaattctcaataaagccatagtgaaccacatttccctcagtggttttcaagtagccttgccgttcccatatatcatatgg

SEQ ID NO: 33292 - DNA, 260 bp, Unknown; identical to SEQ ID NO: 33265
  Description of Unknown: RightRegion for integrase B7293 sequence

SEQ ID NO: 33293 - DNA, 260 bp, Unknown
  Description of Unknown: RightRegion for integrase B7294 sequence
ccaccaaagagagaacaggttgaagcatttatgtctaatgtaggggaagtgtctttgtagccttgcccgaactgaaccattgtaaatccaagcccctccagattttgcgacatctgcactgcaccccagcggtcaaatgcaatttctttgatgtgaaatttctgccccagttcatcgatgaaattctcaataaaaccatagtgaaccacatttccctcagtcgttttcaagtagccttgccgttcccatatatcatatgg

SEQ ID NO: 33294 - DNA, 260 bp, Unknown; identical to SEQ ID NO: 33270
  Description of Unknown: RightRegion for integrase B7295 sequence

SEQ ID NO: 33295 - DNA, 260 bp, Unknown
  Description of Unknown: RightRegion for integrase B7296 sequence
gatcgtatcgtctatgaaaaagcttccgggaccatgtatttcgactttttcgtttcctgatttttgttccgaaagcccgcaaacccgcataaacactggttttttcccttatcatctggtatggaactccgggccaccatactgactcatgataatttgggcgattttggggtttggtgtcgtgatgtttacaggatactcgaggcgtttttcataattccacatccgtcagcaccctcctttccggttgacttcccacg

SEQ ID NO: 33296 - DNA, 260 bp, Unknown
  Description of Unknown: RightRegion for integrase B7297 sequence
ctgaaatgcatcgttttcgaccgaaagaccgagcattttgattttcaatattatgcatgaaatagcggagaaccttgaaaaaataaggctctccgcttattataggttactgcactttagaccgccatactggctcattatatattgcgcgatcttcggattcggcgtcttgatattgactggatattgtaatcttttttcatatctccacatacgctacacctccccttcccacggccagcgctctgtaagccaggacc

SEQ ID NO: 33297 - DNA, 109 bp, Unknown; identical to SEQ ID NO: 33263
  Description of Unknown: RightRegion for integrase B7298 sequence

SEQ ID NO: 33298 - DNA, 260 bp, Unknown
  Description of Unknown: RightRegion for integrase B7299 sequence
gacggaatcacctatgataaggagaaaaaccggctgtattttaactttttcatttcatgaaaaatcgccggaaacccttataaaatggggcttcccggcgttttgtagggtattgcaatcggggccaccgtattgtgatgcaataatcttcgcgatccgtgcatccgtttttgtgatatttaccggatattgcaatcgtttttcatatatccacatacactaacacctgcctttcccggatctttcccatggccatggct

SEQ ID NO: 33299 - DNA, 109 bp, Unknown
  Description of Unknown: RightRegion for integrase B7300 sequence
gacggaatcacctatgataaggagaaaaaccggctgtattttaactttttcatttcataaaaaacgccggaaagccccattttataagggtttccggcgatttgtaggg

SEQ ID NO: 33300 - DNA, 260 bp, Unknown
  Description of Unknown: RightRegion for integrase B7301 sequence
gacggtatcacctatgataaggagaaaaaccggctgtattttaactttttcatttcatgaaaaaaacgccgggaagccctattttataagggtttccggcgatttgtagggtattgcaatccgggccaccgtattgtgatgcaataatcttcgcgatccctgcatccgtttttgtgatatttaccggatattgcaatcgtttttcatatatccacatacactaacacctgcctttcccggatctttcccatggccatggc

SEQ ID NO: 33301 - DNA, 260 bp, Unknown
  Description of Unknown: RightRegion for integrase B7302 sequence
ccaccaaagagagaacaggttgaagcatttatgtctaatgtaggggaagtgtccttgtagccctgcccgaactgcacaagagtaaatccaagttcctccaaattctgcgacatctgcaccgcaccccatctatcaaaagcaatctctttgatgtggaatttctgtcccagttcatcaatgaagttttcgataaaaccatagtggacaacattgccctcagtagttttcagataaccttgccgttcccatacatcataggg

SEQ ID NO: 33302 - DNA, 109 bp, Unknown
  Description of Unknown: RightRegion for integrase B7303 sequence
gatcgtatcgtctatgaaaaagcttccgggaccatgtatttcgactttttcgtttcctgatttttgttccgaaagtccgcaaacccgcataaacactggttttttccct

SEQ ID NO: 33303 - DNA, 109 bp, Unknown
  Description of Unknown: RightRegion for integrase B7304 sequence
atcagcaagatagtatatactaaatccaatgaagaaatcgagatgtactactatatgtagtacatctccttttactatacggcggacccgatggcgaattgggcgccag

SEQ ID NO: 33304 - DNA, 260 bp, Unknown
  Description of Unknown: RightRegion for integrase B7305 sequence
gatcgtatcgtctatgaaaaggcttccggaaccatgtatttcgactttttcgtctcctgatttttttccgaaagtccgcaaacccgcataaacactggatttttccgtatcatctggtacggaactccgggccaccgtactgactcatgataatttgggcgattttggggtttggtgtcgtgatgtttacaggatactcgaggcgtttttcataattccacatccgtcagcaccctcctttccggttgacttcccacggc

SEQ ID NO: 33305 - DNA, 260 bp, Unknown
  Description of Unknown: RightRegion for integrase B7306 sequence
gacgggattacctacgataaggagaaaaataggctgtattttaactttttcatttcatgaaaaaacgccgggaagccccattttataagggtttccggcgttttgtagggtattgcaatcggggccaccggagttcaatagcctatataggttttcttttaataggaagaaactctttcgatttcaagagtttttttaagagtttttagagatgatacaatatttttaccacttgtgatttgacatgtcaaggaatgtcg

SEQ ID NO: 33306 - DNA, 260 bp, Unknown; identical to SEQ ID NO: 33301
  Description of Unknown: RightRegion for integrase B7307 sequence

SEQ ID NO: 33307 - DNA, 227 bp, Unknown
  Description of Unknown: RightRegion for integrase B7308 sequence
gatcgtatcgtctatgaaaaggcttccgggacgatgtatttcgacttttttgtctcctgattttttgtttcaaaaaaaccgcaaacccgcataaacactgaggtttctggcatatcatctggtacggaactccgggccaccgtactgactcatgataatttgggcgattttagggtttggtgtcgtgatgtttacaggatactcgaggcgtttttcataattccaca

SEQ ID NO: 33308 - DNA, 260 bp, Unknown
  Description of Unknown: RightRegion for integrase B7309 sequence
gatcgtatcgtctatgaaaaagcttccgggaccatgtatttcgactttttcgtttcctgatttttgttccgaaagtccgcaaacccgcataaacactggttttttcccttatcatctggtatggaactccgggccaccggaatgcaataacagatgatatattgtaactgtaaatatttcgatgatacaatatgtttcccgggtaatttgcccgggattttttattgcatttcttctatatatatgttatcatagcacgt

SEQ ID NO: 33309 - DNA, 260 bp, Unknown
  Description of Unknown: RightRegion for integrase B7310 sequence
gatcgtatcgtctatgaaaaatcttctggaacgatgtattttgacttttttgtttcttgattttccatcccgaaaagctcgcaaacccgcataaatactggcttttctggcttatcatctggtattgaactccgggccaccatactgactcatgataatttgggcgattttggggtttggtgtcgtgatgtttacaggatactcgaggcgtttttcataattccacatccgtcagcaccctcctttccggttgacttccc

SEQ ID NO: 33310 - DNA, 260 bp, Unknown
  Description of Unknown: RightRegion for integrase B7311 sequence
ccaccaaagagagaacaggttgaagcatttatgtctaatgtaggggaagtatctttataaccctgtccaaattgcaccatcgtgaatccaagtccttccaaattctgtgacatctgcactgcaccccagcggtcaaatgcaatttctttgatgtgaaatttctgccccagttcatcgatgaaattctcaataaaaccatagtgaaccacatttccctcagtcgttttcaagtagccttgccgttcccatatatcatatgg

SEQ ID NO: 33311 - DNA, 109 bp, Unknown
  Description of Unknown: RightRegion for integrase B7312 sequence
gaacccgcccgacttgacgtcgaacgggttcttccagaagcttcatggctccccgggtaggattcgaacctacaaccctccggttaacagccggatgctctgccgttga

SEQ ID NO: 33312 - DNA, 260 bp, Unknown
  Description of Unknown: RightRegion for integrase B7313 sequence
gacggaatcacctacgataaggagaaaaaccggctgtattttaactttttcatttcatgaaaaaacgccgggaagccctattttataagggtttccggcgatttgtagggtattgcaatccggaccaccgtattgtgatgcaataatcttcgcgatccgtgcatccgtttttgtgatatttaccggatattgcaatcgtttttcatatatccacatacactaacacctgcctttcccggatctttcccatggccatggct

SEQ ID NO: 33313 - DNA, 260 bp, Unknown; identical to SEQ ID NO: 33266
  Description of Unknown: RightRegion for integrase B7314 sequence

SEQ ID NO: 33314 - DNA, 260 bp, Unknown; identical to SEQ ID NO: 33309
  Description of Unknown: RightRegion for integrase B7315 sequence

SEQ ID NO: 33315 - DNA, 260 bp, Unknown
  Description of Unknown: RightRegion for integrase B7316 sequence
gatcgtatcgtctatgaaaaagcttccgggaccatgtatttcgactttttcgtttcctgatttttgttccgaaagtccgtaaacccgcataaacactggattttttcgtatcatctggtacggaactccggtccaccgtactgactcatgataatttgggcgattttagggtttggtgtcgtgatgtttacaggatactcgaggcgtttttcataattccacatccgtcagcaccctcctttccggttgacttcccacgg

SEQ ID NO: 33316 - DNA, 260 bp, Unknown
  Description of Unknown: RightRegion for integrase B7317 sequence
atcagcaagatagtatatactaaatccaatgaagaaatcgagatgtactactatatgtagtacatctccttttactatacggcggacctaactgcaaaaagatatagcctcttgctttagcaagaggctatgctatcaattatgtataccgcaagtgagaacggcatacacaggtatcattatctccgtgatcattgtcataccacagaatataatatactgctccaaccatgtacccataaaggcgaattgttccagtg

SEQ ID NO: 33317 - DNA, 260 bp, Unknown
  Description of Unknown: RightRegion for integrase B7318 sequence
gatcgtatcgtctatgaaaaggcttccggaaccatgtatttcgactttttcgtctcctgattttttccgaaagtccgcaaacccgcataaacactggatttttccgtatcatctggtacggaactccgggccaccatactgactcatgataatttgggcgattttggggtttggtgtcgtgatgtttacaggatactcgaggcgtttttcataattccacatccgtcagcaccctcctttccggttgacttcccacggcc

SEQ ID NO: 33318 - DNA, 109 bp, Unknown
  Description of Unknown: RightRegion for integrase B7319 sequence
atttcttatatcatctttgaccgcgcagcaaccaccttcaatataattttccatttttaaggcgagacagccgctcccgcagctccgttgtctatgccttaaaaaatta

SEQ ID NO: 33319 - DNA, 260 bp, Unknown
  Description of Unknown: RightRegion for integrase B7320 sequence
tcttcccctaccgcatctgttaaaaaggtttatgacgttaagctggtcagatttttttagtttttatgtctacttaacacagacgaaatgctcctgattcaacagtctcaattcatcccgcaacaactcataggcgtcttgcggcgaacgaatcgtcggcatactcactttcggttcctcgacgtatcgaatcccgatcgtgaacgcggcgaggagttgctccgccttcttcttcgtcatcccttcgattttgcataaat

SEQ ID NO: 33320 - DNA, 99 bp, Unknown
  Description of Unknown: RightRegion for integrase B7321 sequence
gaacccgtccgacttgacatcgaacgggttcttccagaagcttcatggctccccgggtaggattcgaacctacaaccctccggttaacagccggatgct

SEQ ID NO: 33321 - DNA, 260 bp, Unknown
  Description of Unknown: RightRegion for integrase B7322 sequence
gacggaatcacctatgataaggagaaaaaccggctgtattttaactttttcatttcatgaaaaaacgccgggaagccccattttataagggttcccggcgttttgtagggtattgcaatcggggccaccgtattgtgatgcaataatcttcgcgatccgtgcatccgttttcgtgatatttaccggatattgcaatcgtttttcatatatccacatacactaacacctgcctttcccggatctttcccatggccatggct

SEQ ID NO: 33322 - DNA, 260 bp, Unknown
  Description of Unknown: RightRegion for integrase B7323 sequence
gacggaatcacctatgataaggagaaaaaccggctgtattttaactttttcatttcataaaaaacgccggaaagccccattttataagggtttccggcgatttgtagggtattgcaatcggggccaccgtattgtgatgcaataatcttcgcgatccctgcatccgtttttgtgatatttaccggatattgcaatcgtttttcatatatccacatacactaacacctgcctttcccggatctttcccatggccatggctg

SEQ ID NO: 33323 - DNA, 260 bp, Unknown
  Description of Unknown: RightRegion for integrase B7324 sequence
gatcgtatcgtctatgaaaaggcttccggaaccatgtatttcgactttttcgtttcctgatttttgttccgaaagtccgaaaacccgcataaacgctgggctttttggcgtatcatctggtattgatatccgggccaccatactgactcatgataatttgggcgattttggggtttggtgtcgtgatgtttacaggatactcgaggcgtttttcataattccacatccgtcagcaccctcctttccggttgacttcccac

SEQ ID NO: 33324 - DNA, 260 bp, Unknown
  Description of Unknown: RightRegion for integrase B7325 sequence
ccaccaaagagagaacaggttgaagcatttatgtctaatgtaggggaagtgtctttgtaaccctgaccgaactgaaccatcgtgaatccaagtccctccagattctgtgacatctgcactgcaccccaacggtcaaatgctatttctttgatgtgaaacttctgtcccagttcatcgatgaagttttcgataaaaccgtagtgaaccacattgccctcagtggttttcagatagccttgccgttcccaaatatcatatgg

SEQ ID NO: 33325 - DNA, 260 bp, Unknown
  Description of Unknown: RightRegion for integrase B7326 sequence
ccaagactccgttctcgtttgaggacggagttttgttctatattatccgctattcaatgatacgtccgctgcgagtgatcgcggcggactttttcttgcctgtcgggcggcgatatgctaacataggcctgataaatcgacacacaggagaaaagctatggtaaaacaaaatctgcattgccacacgacgtttgacgacggggcgagcacgcccgaggagatggtctgcgcggcaatggagcacgggctaagctcgctgg

SEQ ID NO: 33326 - DNA, 188 bp, Unknown
  Description of Unknown: RightRegion for integrase B7327 sequence
gatcgtatcgtctatgaaaaatcttctggaacgatgtattttgacttttttgtttcttgattttccatcccgaaaagctcgcaaacccgcataaatactggcttttctggcttatcatctggtattgaactccgggccaccggaatgcaccattatcgagtctcttgtacataaggagaaaaccatcg

SEQ ID NO: 33327 - DNA, 260 bp, Unknown
  Description of Unknown: RightRegion for integrase B7328 sequence
gatcgtatcgtctatgaaaaagcttccgggaccatgtatttcgactttttcgtttcttgatttttgttccgaaagcccgcaaacccgcataaacactggttttttcctttatcatctggtatggaactccgggccaccgtactgactcatgataatttgggcgattttagggtttggtgtcgtgatgtttacaggatactcgaggcgtttttcataattccacatccgtcagcaccctcctttccggttgacttcccacg

SEQ ID NO: 33328 - DNA, 260 bp, Unknown
  Description of Unknown: RightRegion for integrase B7329 sequence
gatcgtatcgtctatgaaaaagcttccggaacgatgtattttgacttttttgtctcctgattcttcctcccaaaaagcccgcaaagccacataaacactggattttccggcatatcatctggtacggaactccgggccaccatactgactcatgataatttgggcgattttggggtttggtgtcgtgatgtttacaggatactcgaggcgtttttcataattccacatccgtcagcaccctcctttccggttgacttccc

SEQ ID NO: 33329 - DNA, 260 bp, Unknown
  Description of Unknown: RightRegion for integrase B7330 sequence
gatcgtatcgtctatgaaaaagcttccgggaccatgtatttcgactttttcgtttcctgatttttgttccgaaagcccgcaaacccgcataaacactggttttttcccttatcatctggtatggaactccgggccaccgtactgactcatgataatttgggcgattttagggtttggtgtcgtgatgtttacaggatactcgaggcgtttttcataattccacatccgtcagcaccctcctttccggttgacttcccacg

SEQ ID NO: 33330 - DNA, 260 bp, Unknown
  Description of Unknown: RightRegion for integrase B7331 sequence
gatcgtatcgtctatgaaaaggcttccggaaccatgtatttcgactttttcgtctcctgatttttttccgaaagtccgcaaacccgcataaacactggatttttccgtatcatctggtacggaactccgggccaccatactgactcatgataatttgggcgattttggggtttggtgtcgtaatgtttacaggatactcgaggcgtttttcataattccacatccgtcagcaccctcctttccggttgacttcccacggc

SEQ ID NO: 33331 - DNA, 141 bp, Unknown
  Description of Unknown: RightRegion for integrase B7332 sequence
gatcgtatcgtctatgaaaaagcttccggaacgatgtattttgacttttttgtctcctgattcttcctcccaaaaagcccgcaaagccgcataaacactggattttccggcatatcatctggtacggaactccgggccacc

SEQ ID NO: 33332 - DNA, 260 bp, Unknown
  Description of Unknown: RightRegion for integrase B7333 sequence
ctgaaatgcattgttttcgaccggaagaccgagcattttgattttcaatattatgcatgaaatagcggagaaccttgaaaaataaggctctccgcttattataggttactgcactttagaccgccatactggctcattacatattgcgcgatcttcggattcggcgtcttgatattgactggatattgtaatcttttttcatatctccacatacgctacacctccccttcccacggccagcgctctgtaagccaggacca

SEQ ID NO: 33333 - DNA, 260 bp, Unknown
  Description of Unknown: RightRegion for integrase B7334 sequence
gacgggattacctatgataaggagaaaaataggctgtattttaactttttcatttcatgaaaaaacgccgggaagccccattttataagggtttccggcgatttgtagggtattgcaatccgggccaccggagttcaatagcctatataggttttcttttaataggaagaaactctttcgatttcaagagtttttttaagagtttttagagatgatacaatatttttaccacttgtgatttgacatgtcaaggaatgtcg

SEQ ID NO: 33334 - DNA, 109 bp, Unknown
  Description of Unknown: RightRegion for integrase B7335 sequence
gatcgtatcgtctatgaaaaagcttccgggaccatgtatttcgactttttcgtttcctgatttttgttccgaaagcccgcaaacccgcataaacactggttttttccct

SEQ ID NO: 33335 - DNA, 260 bp, Unknown
  Description of Unknown: RightRegion for integrase B7336 sequence
ttgaaatgcatcgttttcgaccggaagaccgagcattttgattttcaatattatgcatgaaatagcggagaaccttgaaaaataaggctctccgcttattataggttactgcactttagaccgccatactggctcattatatattgcgcgatcttcggattcggcgtcttgatattgactggatattgtaatcttttttcatatctccacatacgctacacctccccttcccacggccagcgctctgtaagccaggacca

SEQ ID NO: 33336 - DNA, 260 bp, Unknown
  Description of Unknown: RightRegion for integrase B7337 sequence
atcagcaagatagtatatactaaatccaatgaagaaatcgagatgtactactatatgtagtacatctccttttactatacggcggacccgatggcgaattgggcgccagcctgcgctacctttcgcaaaaattttccatgcccaaccgccgggtcgccggtctcctcaatgatattggcaccgaggagctggctcatctggagatgatcggcaccatcgtccaccagctcaccaggaatctctccatcgaagagatcaaa

SEQ ID NO: 33337 - DNA, 109 bp, Unknown
  Description of Unknown: RightRegion for integrase B7338 sequence
gatcgtatcgtctatgaaaaagcttctgggaccatgtatttcgactttttcgtttcctgattcttcctttaaaaaatcccgcaaagccgcataaacactggattttctg

SEQ ID NO: 33338 - DNA, 260 bp, Unknown
  Description of Unknown: RightRegion for integrase B7339 sequence
ctgtcgaaaatcgtctatgacaaagcatttcagcgcctggtcctctatttttatgcctgattttcttagcttattcttatcatcggttttcgccgtttagtcctccacacggaaaaaaccgataacacgtctaacgcttcatttacatgcaacatatcatcccctcatgcaaaagtcaaggacagcgcgtttgcgctgtcctttttctcattttgcgtttaattcgttgtagactttttgacctattgccacgctgtaag

SEQ ID NO: 33339 - DNA, 260 bp, Unknown
  Description of Unknown: RightRegion for integrase B7340 sequence
attgccaaaatcgtgtatgaaaaatcaaaaaaaagacttgtttttttctttcacacataaagttatattcctttactgtctggcggtccggacggcgagttgggagcttcgctgagatatctcagccagcgttttgctatgccatatcccgagcttaaaggattgctgacggatattggcacagaggagctcggtcaccttgaaatgatcggagcgatcgtccaccagcttacaaggaacctttcgtatgacgagatcaa

SEQ ID NO: 33340 - DNA, 260 bp, Unknown
  Description of Unknown: RightRegion for integrase B7341 sequence
tcagtcataaatgaaattgttgtcacaaaagaagaaatgacgataacgctagacttctaagggtttagcgttatttttgtattttggtcaaagcgataatgattagttagagcaaaatacacaaaaaattattttcacagtcatgcactttccctttccatctcatacatccgcaccgagtgcagcacgagttcccgatacttccaagttgataccagatactcaatgacttcctggtcctctatcttacattccatcaa

SEQ ID NO: 33341 - DNA, 260 bp, Unknown
  Description of Unknown: RightRegion for integrase B7342 sequence
gtcgatcagattgtatttgacaaagaggctgaaatggtgtattttgatattatcatctaagacacatcaatttttcactggttacgattgtactatttcttaattcagatttaacttttttccaaaaaacaagtgaattttatctattatagggtatcggactccggtggcccggatggagaaatcggtgcttctatgcgctatctctcccagcgctttaccatgccgaaccgaacctctgcagctgtgcttaatgatat

SEQ ID NO: 33342 - DNA, 260 bp, Unknown
  Description of Unknown: RightRegion for integrase B7343 sequence
tttgaaattactttgaaattatcagatatggaaataaaagaaacagttgaatttgaataaaaaagaagcctttctttcgggaaaaagaaaggcttcataagtcggattgtcagatatttttggaaaacggcaatctgataatttctctataatcaatataatcattttacttttttctgtcaataaactactgcaacaatcttgaatgattatatttcacatccttaactttcgttattgcatattctgttgttgtgctt

SEQ ID NO: 33343 - DNA, 260 bp, Unknown
  Description of Unknown: RightRegion for integrase B7344 sequence
gaagacattgtctatgacaagaaaaacgggaagatgatttttactctttacatctcgtaagtcttaaaaataaaggctttgcgagatgttataggttattgcattttcgtcctccgaattgttaaaacatataatatagaagaaaccgctcctcatctctccgggttacgttgaataaggaacggtctcttttgtatctttggttacaatatattccatgtgtgtaattttgtcaaattattttaaatttgctattgact

SEQ ID NO: 33344 - DNA, 260 bp, Unknown
  Description of Unknown: RightRegion for integrase B7345 sequence
attgccaaaatcgtgtacgaaaaatcaaagaaaagacttgtttttttctttcacacataaagttatattcctttactatctggcggtccggacggagagctcggtgcctcactgagatatctcagccagcgtttttcaatgccatatcccgaacttaagggacttctgacggatataggtacagaggaattgggacatcttgaaatgatcggagcgatcgttcatcagctgacgagaaatctttcgtatgatgaaatcaa

SEQ ID NO: 33345 - DNA, 260 bp, Unknown
  Description of Unknown: RightRegion for integrase B7346 sequence
gttgaaaaagtaatatattccaagcctgaagagtcagtgaaaatatttttttatctgtaatcatacgcatttgacatatggaggtccgcatggtaaatgcgtatgaaaaaagcagggttaattgccctgcttacttatgccaattttatacttttcttttaagcaattcagttttgaattgtgctcaaccttagtgtcattttgtagccttcctacaactattcccggaggcctatctatttctttcgcaaaggttttaa

SEQ ID NO: 33346 - DNA, 260 bp, Unknown
  Description of Unknown: RightRegion for integrase B7347 sequence
aaaattgtatttgaccgtgaaaacaagctgattgacatttattattatacttctgtatagcttagaaatggcttatttatgcgatttattaaagttcatatgtacttgctaaaaggatgacgcagtggggttctaaatacttaggcgatcagggatatgctccgattgaaatcctgagatattattatggagagagtatgtacatcaataccgcagaacagatttcaggaattccttcttcctggccgggatatgatctg

SEQ ID NO: 33347 - DNA, 109 bp, Unknown
  Description of Unknown: RightRegion for integrase B7348 sequence
gtcgatcagattgtatttgacaaagaggctgaaatggtgtattttgatattatcatctaagacacatcaatttttcactggttacgattgtactatttcttaattcaaa

SEQ ID NO: 33348 - DNA, 260 bp, Unknown; identical to SEQ ID NO: 33343
  Description of Unknown: RightRegion for integrase B7349 sequence

SEQ ID NO: 33349 - DNA, 260 bp, Unknown
  Description of Unknown: RightRegion for integrase B7350 sequence
attgataaaattgtttacgataaaaagaaaaatcagctgcaaattttttattttgcttaactgtatcgcttaaagcaatacggcggcccggactgatttaagtgataataaaataaaggcataccctccggcctgcctcacaattatcctgcgccattttgtattaaacgcagcgctattatcgctttaatatatgtattatatttataaaaaacataaataaccaacataaaaaatgtacatatttaacaaaaatatgg

SEQ ID NO: 33350 - DNA, 260 bp, Unknown
  Description of Unknown: RightRegion for integrase B7351 sequence
gtcgatcagattgtatttgacaaagaggctgaaatggtgtattttgatattatcatctaagacatatcaatttttcacaggttacgattgtactatttcttaattcagatttaacttttttccaaaaaacaagtgaattttatctattatagggtatcggactccggtggcccggatggagaaatcggtgcttctatgcgctatctctcccagcgctttaccatgccgaaccgaacctctgcagctgtgcttaatgatat

SEQ ID NO: 33351 - DNA, 260 bp, Unknown
  Description of Unknown: RightRegion for integrase B7352 sequence
attgccaaaatcgtgtacgaaaaatcaaagaaaagacttgtttttttctttcacacataaagttatattcctttactgtctggcggtccggacggcgagttgggagcttcgctgagatatctcagccagcgttttgctatgccttatcccgagcttaaaggattgctgacggatattggcacagaggagctcggtcaccttgaaatgatcggagcgatcgtccaccagctgacaaggaacctttcgtatgacgagatcaa

SEQ ID NO: 33352 - DNA, 109 bp, Unknown
  Description of Unknown: RightRegion for integrase B7353 sequence
attgccaaaattgtgtatgaaaaatcaaagaaaagacttgtttttttctttcacacataaagttatattcctttactgtacggcggtccggacggcgagttgggagctt

SEQ ID NO: 33353 - DNA, 260 bp, Unknown
  Description of Unknown: RightRegion for integrase B7354 sequence
caattagttagttctattgatgtcacaaacgaaaatgtaacgattaactgggatttctagttaactgttatttttttgaatagatttagagagtgtaatttcaataacgttctctaaaactattaaaaaataattttctacattaaattaggattgtaaaatacaaaataacccgacacctcaaatgaagtgccgggttattttgtaccactcaaaaatcagtatagcatacttttatcggtgcaatttaacgttgcttt

SEQ ID NO: 33354 - DNA, 260 bp, Unknown
  Description of Unknown: RightRegion for integrase B7355 sequence
ttgaaatgcatcgttttcgaccgaaagaccgagcattttgattttcaatattatgcatgattatgcatgaaatagcggagaaccttgaaaaataaggctctccgcttattataggttactgcactttagaccgccatactggctcattatatattgcgcgatcttcggattcggcgtcttgatattgactggatattgtaatcttttttcatatctccacatacgctacacctccccttcccacggccagcgctctgtaa

SEQ ID NO: 33355 - DNA, 260 bp, Unknown
  Description of Unknown: RightRegion for integrase B7356 sequence
gaagatattgtctatgacaagaaaaacgggaagatgatttttaccctttacatctcgtaagccttaaaaataaaggctttgcgagatgttataggttattgcattttcgtcctccgaattgttaaaacctataatatatagaagaaactccgaatgatacaataaaagaaaccgctcctcatttctctggggtgaggtgcggtctctttgtttatttctacttataatatagcatcgtctatttgatgtgtcaataagtt

SEQ ID NO: 33356 - DNA, 109 bp, Unknown
  Description of Unknown: RightRegion for integrase B7357 sequence
attgccaaaatcgtgtacgaaaaatcaaagaaaagacttgtttttttctttcacacataaagttatattcctttactgtacggcggtccggacggcgagttgggagctt

SEQ ID NO: 33357 - DNA, 109 bp, Unknown
  Description of Unknown: RightRegion for integrase B7358 sequence
attgccaaaatcgtgtacgaaaaatcaaaaaaaagacttgtttttttctttcacacataaagttatattcctttactgtacggcggtccggacggcgagttgggagctt

SEQ ID NO: 33358 - DNA, 260 bp, Unknown
  Description of Unknown: RightRegion for integrase B7359 sequence
attgccaaaatcgtgtacgaaaaatcaaagaaaagacttgtttttttctttcacacataaagttatattcctttactgtctggcggtccggatggagagctcggtgcctcactgagatatctcagccagcgtttttcaatgccctatcccgaacttaagggcttgctgacagatataggaacagaagaattgggacatcttgagatgatcggagcgattgttcatcagctgacgagaaatctttcgtatgatgaaatcaa

SEQ ID NO: 33359 - DNA, 109 bp, Unknown
  Description of Unknown: RightRegion for integrase B7360 sequence
atcgccaaaatcgtgtacgaaaaatcaaagaaaagacttgtctttttctttcacacataaagttatattcctttactgtacggcggtccggacggtgagttgggagctt

SEQ ID NO: 33360 - DNA, 260 bp, Unknown
  Description of Unknown: RightRegion for integrase B7361 sequence
gttgaaaaggtaatatattccaagcctgaagagtcggttaaaatattcttttatttataattttctatattcaccacataaaagagtggcggaaatgcccctcttttattgacattatagtgcaaaatagatataatgcaactataaagtagttgcaaacaagggaaagcaaaatgagcaaatttgaaaaggcaaaagaaagaataaggtcaaagccaaaagattatacttatgatgaagcaaggtatttgctatcccag

SEQ ID NO: 33361 - DNA, 260 bp, Unknown
  Description of Unknown: RightRegion for integrase B7362 sequence
gtcgatcagattgtatttgacaaagaggctgaaatagtgtattttgatattatcatctaagacacatcaatttttcactggttacgattgtactatttcttaattcagatttaacttttttccaaaaaacaagtgaattttatctattatagggtatcggactccggtggcccggatggagaaatcggtgcttctatgcgctatctctcccagcgctttaccatgccgaaccgaacctctgcagctgtgcttaatgatat

SEQ ID NO: 33362 - DNA, 109 bp, Unknown
  Description of Unknown: RightRegion for integrase B7363 sequence
atcgccaaaatcgtgtacgaaaaatcaaaaaaaagacttgtttttttctttcacacataaagttatattcctttactgtacggcggtccggacggcgagttgggagctt

SEQ ID NO: 33363 - DNA, 260 bp, Unknown
  Description of Unknown: RightRegion for integrase B7364 sequence
ttgaaatgcatcgttttcgaccggaagaccgagcattttgattttcaatattatgcatgaaatagcggagaaccttgaaaaaataaggctctccgcttattataggttactgcactttagaccgccatactggctcattatatattgcgcgatcttcggattcggcgtcttgatattgactggatattgtaatcttttttcatatctccacatacgctacacctccccttcccacggccagcgctctgtaagccaggacc

SEQ ID NO: 33364 - DNA, 260 bp, Unknown
  Description of Unknown: RightRegion for integrase B7365 sequence
attgccaaaatcgtgtacgaaaaatcaaagaaaagacttgtttttttctttcacacataaagttatattcctttactgtacggcggtccggacggcgagttgggagcttcgctgagatatctcagtcagcgttttgctatgccctatcccgagcttaaaggattgctgacggatattggcacagaggagctcgggcaccttgaaatgatcggagcgatcgtccaccagctgacaaggaacctttcgtatgacgagatcaa

SEQ ID NO: 33365 - DNA, 260 bp, Unknown
  Description of Unknown: RightRegion for integrase B7366 sequence
tctgtcataaatgagattgttgtaaccaaagaagaaatgacgataacgctagacttttaagggtttagcgctatttttgtattttagtcaaattgataatgataactttattatacatattttcttcctcctacttatctattcgcaaggaatcaaaaaaagttacagaaatttgtaacttttcgagaaaattttttattttttatgaaccatgaaacctgtcgcctgttgattggccataatggtcatatctgtaatct

SEQ ID NO: 33366 - DNA, 260 bp, Unknown
  Description of Unknown: RightRegion for integrase B7367 sequence
gtcgatcagattgtatttgacaaagaggctgaaatggtgtattttgatattatcatctaagacatatcaatttttcacaggttacgattgtactatttcttaattcagatttaacttttttccaaaaaacaagtgaattttatctattatagggtatcggactccggtggcccggatggagaaatcggtgcttctatgcgctatctctcccagcgctttaccatgccaaaccgaacctctgcagctgtgcttaatgatat

SEQ ID NO: 33367 - DNA, 260 bp, Unknown
  Description of Unknown: RightRegion for integrase B7368 sequence
caaggcgataaagtcaaaatcacattcaaaccaacttttcgaaaaatccgtaaaagataattagtcataaattccttatttttgaatgtacccgcacattttcatgtgtgggttttcttttgcttattatttaaaaatagcaataaaagataaaattaatgctaaaaatgcaattacatttgaaattatatttgcccaaggaattgatttatttaaaccaacaaaatcagttaatctttcagcaacacattgtaagtcta

SEQ ID NO: 33368 - DNA, 260 bp, Unknown
  Description of Unknown: RightRegion for integrase B7369 sequence
atgctcatcgatcacatcaacgtaagtaatactgatttggatatttactggcaaatctaatggccgctttcaaaggcggcttttttcttgcccaaaacaaaaagatttagagagtgccatttccaccagggtaaagcccttggccacccgttttttcaatttctttaacattattccaccacctgtaatgattgatagattggcatcaggatacttaaatacatcaccacaaccacagcagctatcatcaccagaatcag

SEQ ID NO: 33369 - DNA, 260 bp, Unknown
  Description of Unknown: RightRegion for integrase B7370 sequence
atcgccaaaatcgtgtacgaaaaatcaaaaaaaagacttgtttttttctttcacgcataaagttatattcctttactgtctggcggtccggacggcgagttgggagcttcgctgagatatctcagccaacgttttgctatgccttatcccgagcttaaaggattgctgacggatattggcacagaggagctcgggcaccttgaaatgatcggagcgatcgtccaccagctgacaaggaacctttcgtatgacgagatcaa

SEQ ID NO: 33370 - DNA, 260 bp, Unknown
  Description of Unknown: RightRegion for integrase B7371 sequence
gaagacattgtctatgataaacaaaatgaccgtctccttttccacttctattgctcatagagccgcataaacagcggctctatattagttatatgtttttgcactctggcggaccagacggcgaacttaatgcttctcttcgttatctttctcagagatttactatgccgaaccgaaaagcgatgggtgtattaaatgatataggtacagaggcaactgtaatattctcaccatcgactgatgctttttttgacgctttt

SEQ ID NO: 33371 - DNA, 109 bp, Unknown
  Description of Unknown: RightRegion for integrase B7372 sequence
gtcgatcagattgtatttgacaaagaggctgaaatggtgtattttgatattatcatctaagacatatcaatttttcacaggttacgattgtactatttcttaattcaga

SEQ ID NO: 33372 - DNA, 260 bp, Unknown
  Description of Unknown: RightRegion for integrase B7373 sequence
gtaatcgaccgcgtgatctatgtcaaatcctccggtgagcttgcagtatactacagatagacaaaataaccccacacatacacaatgtgtggggttatctctttttgcaatacggcgggctgtattgcttttagatataatagtcaggtcatgcaatgctgtattgtgacagcatcattttgatcttggccgcccgctctatcattctctcgtgcataaagtcatacacggtcttcattccctccggaatactctttccg

SEQ ID NO: 33373 - DNA, 260 bp, Unknown
  Description of Unknown: RightRegion for integrase B7374 sequence
ttaatcaacagaattgaagtagatgatgatgatatttatatctattggaacttcgtctgatttttattttgcccatttcggcatatcattcaacctcggttaatactgctaaagttactttaaagaaatacttcaaatcaaccgaataaaaacctctgttaaacggcacagcctcaatatccgtaaacacccaaatcacttcggcttttgtgcatttaacgtttattgctctgtccacaatatcctgaccgcacgaagtc

SEQ ID NO: 33374 - DNA, 260 bp, Unknown
  Description of Unknown: RightRegion for integrase B7375 sequence
ttaatcaacagaattgaagtagatgatgatgatatttatatctattggaacttcgtctgatttttattttgcccatttcggcatatcattcaacctcggttaatactgctaaggtaactttaaagaaatacttcaaatcaaccgaataaaaacctctgttaaacggcacagcctcaatgtccgtaaacacccaaatcacttcggcttttgtgcatttaacgtttattgctctgtccacaatatcctgaccgcacgaagtc

SEQ ID NO: 33375 - DNA, 109 bp, Unknown
  Description of Unknown: RightRegion for integrase B7376 sequence
gtccgccagattgtttatgcaaagaaaacacaatcgattgaaattttataccaggtctaatttgcttattatctccttttacaattaagaccgccaagctgacttatta

SEQ ID NO: 33376 - DNA, 109 bp, Unknown
  Description of Unknown: RightRegion for integrase B7377 sequence
gatcaaatcgtctgggataaagaaaataacaagatgtattttgatattattgtacattgattttttatctgctattgcactccggtccgccatactggctggatataaa

SEQ ID NO: 33377 - DNA, 260 bp, Unknown
  Description of Unknown: RightRegion for integrase B7378 sequence
aaattaattagtggtatcaaggtatttaacgataaggtagagataaactggaacatttaagcctaatatttttaggctttttaaaaaagtttagagaacatcattgaaatgacgattgctttgttcatccaaagcaaaaaggcatgcagatcatatccacacaccttttaaactattctttattttttaccaatttatattgtgcaactaatgctttggcatttccgccatggccgaattctctgaactcattgtcactt

SEQ ID NO: 33378 - DNA, 260 bp, Unknown
  Description of Unknown: RightRegion for integrase B7379 sequence
aacttgattagtggtatcaaggtatttaacgataaggtagaaataaattggaacatttaagcctaatatttttaggcttttttaaaaaaatttaaagaacgtcatttctattaaagtaaatccacgccttttctttttcactaatataagcctcctagagttttgtatattggtaaaagaattgttaaataagttccaacaataattatcgctatcacgataaatagtatcggttgaactaactcaatcaatttatcaat

SEQ ID NO: 33379 - DNA, 260 bp, Unknown
  Description of Unknown: RightRegion for integrase B7380 sequence
ttaatcaacagaattgaagtagatgatgatgatatttatatctattggaacttcgtctgatttttattttgcccatttcggcatatcattcaacctcggttaatactgctaaggtaactttaaagaaatacttcaaatcaaccgaataaaaacctctgttaaacggcacagcctcaatgtccgtaaacacccaaatcacttcggcttttgtgcatttaacgtttattgctctgtccacaatatcctgaccgcatgaagtc

SEQ ID NO: 33380 - DNA, 260 bp, Unknown
  Description of Unknown: RightRegion for integrase B7381 sequence
gtccgccagattgtttatgcaaagaaaacacaatcgattgaaattttataccaggtctaattcgcttattatctccttttacaatttagaccgccaaatttcaaaaggatataatacaaaataaatcaaaatattccgtctgtacaaaaaaatgttcattacaatatttacatatggacattaatcgacacccttgatataatttatatatatctaaaggaggtcgatattttgagaattgcggtatgcgatgatcagga

SEQ ID NO: 33381 - DNA, 88 bp, Unknown
  Description of Unknown: RightRegion for integrase B7382 sequence
gatcaaatcgtctgggataaagaaaataacaagatgtattttgatattattgtacattgattttttatctgctattgcactccggtcc

SEQ ID NO: 33382 - DNA, 260 bp, Unknown
  Description of Unknown: RightRegion for integrase B7383 sequence
aaattaattagtggtatcaaggtatttaacgataaggtagagataaactggaatatttaagcctaatattttttaggctttttaaaaaagtttagagaacatcattgaaattacgattgttttgttcatccaaaacaaaaagcatgcagattatatccacacaccttttaaactattctttatttcttaccaatttatattgtgcaactaatgcttgggcatttccgccatggccgaattctctgaactcattgtcactt

SEQ ID NO: 33383 - DNA, 260 bp, Unknown
  Description of Unknown: RightRegion for integrase B7384 sequence
ttaatcaacagaattgaagtagatgatgatgatatttatatctattggaacttcgtctgatttttattttgcccatttcggcatatcattcaacctcggttaatactgctaaagttactttaaagaaatacttcaaatcaaccgaataaaaacctctgttaaacggcacagcctcaatgtccgtaaacacccaaatcacttcggcttttgtgcatttaacgtttattgctctgtccacaatatcctgaccgcacgaagtc

SEQ ID NO: 33384 - DNA, 260 bp, Unknown
  Description of Unknown: RightRegion for integrase B7385 sequence
ttaatcaacagaattgaagtagatgatgatgatatttatatctattggaacttcgtctgatttttattttacccatttcggcacatcattcaacctcggttaatactgccaaagttactttaaagaaatacttcaaatcaaccgaataaaaacctctgttaaacggcacagcctcaatgtccgtaaacacccaaatcacttcggctcttgtgcatttaacgtttattgctctgtccacaatatcctgaccgcacgaagtc

SEQ ID NO: 33385 - DNA, 260 bp, Unknown; identical to SEQ ID NO: 33373
  Description of Unknown: RightRegion for integrase B7386 sequence

SEQ ID NO: 33386 - DNA, 260 bp, Unknown
  Description of Unknown: RightRegion for integrase B7387 sequence
caccgacaggatcgggaacacagtcattttgaaataatttacagagacccgtttgcataaagactatcctattttattattaggaagtcctaataataaaataggatagtaaattcagttgagaaaacgtgccagccaaaaagcaagtcaaaaatttggttattttgtaggatgaaaaattcccatcagtgtgttaaaatttaaggagaaggaggtgggcgaaatggtatgtccaaaatgcggaagtgaaaatgtccagg

SEQ ID NO: 33387 - DNA, 260 bp, Unknown
  Description of Unknown: RightRegion for integrase B7388 sequence
gaggaaatttttgcaaaaaaaatagccactacgcaaaacaagcgattgaattgcttgtaaaacgtgtgacaatcattgataagactattaccttgagcttaacaacagaaggttgtctgagcttattggtgccgcggaaccgtgacggtatgagcgtatatacttttactattgctataaatttggcagcttaattactatactaaaaggcaggattcgctcctgccttttctgtttcccttgttaattttttatcgcta

SEQ ID NO: 33388 - DNA, 260 bp, Unknown
  Description of Unknown: RightRegion for integrase B7389 sequence
tcaattccaaaatacaggctcgtggatcattacggcagaaagaaaacctcaggcaactaaaacctgaggcatttttatttagaataatctttgttgaaatatgaactctttttttactgagtcatcgattgtagtccacactcttcctgtttttgcaatcttaataggtctagctagttttcttggattaacgaaatcataagcataaaagactgaatcatcatcttcaatctggaataccatgcctgcccactttccag

SEQ ID NO: 33389 - DNA, 260 bp, Unknown
  Description of Unknown: RightRegion for integrase B7390 sequence
aaattaattagtgatatcaaggtatttaacgataaagtagaaataaactggaacatttaagcctaatattttttaggctttttaaaaaagtttagagaacatcattgaaatggctatcgtcttttttgtccaaaataaaaaggcatgcagatcatatccacacaccttttaaactattctttattttttaccaatttatattgtgcaactaatgctttggcatttccgccatggccgaattctctgaactcattgtcact

SEQ ID NO: 33390 - DNA, 260 bp, Unknown; identical to SEQ ID NO: 33380
  Description of Unknown: RightRegion for integrase B7391 sequence

SEQ ID NO: 33391 - DNA, 260 bp, Unknown
  Description of Unknown: RightRegion for integrase B7392 sequence
aaattaattagtggtatcaaggtatttaacgataaggtagagataaactggaatatttaagcctaatattttttaggctttttaaaaaagtttagagaacatcattgaaacgacatgttctaaatttttttgtgatataatattattgaaagctcaagtttagcaaatcctaagtgtaggagttaaactaacagagtcctaattactgtaattagggcttgttttttttatatctaaaattaaaaaagcttattttttaa

SEQ ID NO: 33392 - DNA, 109 bp, Unknown
  Description of Unknown: RightRegion for integrase B7393 sequence
gatcaaatcgtctgggataaagaaaacaacaagatgtattttgatattattgtacattgattttttatctgctattgcactccggcccgccatactggctggatataaa

SEQ ID NO: 33393 - DNA, 260 bp, Unknown
  Description of Unknown: RightRegion for integrase B7394 sequence
ttaatcaacagaattgaagtagatgatgatgatatttatatctattggaacttcgtctgatttttattttgcccatttcggcatataattcaacctcggttaatactgctaaggtaactttaaagaaatacttcaaatcaaccgaataaaaacctctgttaaacggcacagcctcaatatccgtaaacacccaaatcacttcggcttttgtgcatttaacgtttattgctctgtccacaatatcctgaccgcacgaagtc

SEQ ID NO: 33394 - DNA, 260 bp, Unknown
  Description of Unknown: RightRegion for integrase B7395 sequence
aaattaattagtggtatcaaggtatttaacgataaagtagaaataaactggaacatttaagcctaatattttttaggctttttaaaaaagtttagagaacatcattgaaatggctatcgtcttttttgtccaaaataaaaaggcatgcagatcatatccacacaccttttaaactattctttattttttaccaatttatattgtgcaactaatgctttggcatttccgccatggccgaattctctgaactcattgtcact

SEQ ID NO: 33395 - DNA, 260 bp, Unknown
  Description of Unknown: RightRegion for integrase B7396 sequence
attcgagagctacaaaacaccaaaagtccagaaccagtagaaatattaaagaacagttagaaaagtttaagggcgttactccaaaagacattaacaggcagattgttaatgaactttttgagaagattaccgttgaaccgttggcggttacatgtgcaacactgacatttcaattgaggtctggaagccttgaaaaatgggggtttcccttgcgccgttctgacgatatgattttaactctacattcagaacaacacaag

SEQ ID NO: 33396 - DNA, 260 bp, Unknown
  Description of Unknown: RightRegion for integrase B7397 sequence
gaggaaatttttgcaaaaaaaatagccactacgcaaaacaagcgattgaattgcttgtaaaacgtgtgacaatcattgataagactattaccttgagcttaacaacagaaggttgtctgagcttattggtgccgcggactcgaaattatattgaccgcaatatagtgattaaccgattgtactctcttgcttcctagtttatgctataattatgtagttgtaacaacataatatcagaaacaaggcccggtgtctagccg

SEQ ID NO: 33397 - DNA, 260 bp, Unknown
  Description of Unknown: RightRegion for integrase B7398 sequence
ttaatcatccggagaattactattggaaataccgataataaaatatatattacattttaaaggcgagacttcaacatctcgccttttgttatgctattagtaataaagctagccccatcaatacaaatggaactataaatatgaaaagccatcttttttctttaaattctttggtttcattaaaatacctaatggaagcaaatagtaataaaatcaatgcagatatagaaataattgctacagaatttactaaaaggaat

SEQ ID NO: 33398 - DNA, 260 bp, Unknown
  Description of Unknown: RightRegion for integrase B7399 sequence
aaattaattagtggtatcaaggtatttaacgataaagtagaaataaactggaacatttaagcctaatatttttaggttttttaaaaaagtttagaacatgtcattgaaatggctatcgtcttttttgtccaaaataaaaaggcatgcagatcagatccacacaccttttaaactattctttattttttaccaatttatattgtgcaactaatgcttgggcatttccgccatggccgaattctctgaactcattgtcactt

SEQ ID NO: 33399 - DNA, 109 bp, Unknown
  Description of Unknown: RightRegion for integrase B7400 sequence
ctgaaatgcatcgttttcgaccggaagaccgagcattttgattttcaatattatgcatgattatgcatgaaatagcggagaaccttgaaaaataaggctctccgcttat

SEQ ID NO: 33400 - DNA, 140 bp, Unknown
  Description of Unknown: RightRegion for integrase B7401 sequence
ttcagctttgacaattgggacgatgactttatgccgacaaaaaagacgaaccccagataaaccagggttcatctaattcaactcgggtggagcagaagctacttactgcgaacactatatatgtcaactcagttgaaatc

SEQ ID NO: 33401 - DNA, 260 bp, Unknown
  Description of Unknown: RightRegion for integrase B7402 sequence
cgtattgattttactcgtttagaggacgatacaagtttaaatataacgctattgctataattttactattgtcgcaatagcgtagtatatgatatagtgtaatcattgagacacaaatacataggtgtaacaatcattacactattttttcgtcgtgtaagctaccgagcgacgttataataaatcggtgaggtgtagcacgcccaagcaaagaggtaaaaccccgtaagtgattagacggtggtagctcggtggtatag

SEQ ID NO: 33402 - DNA, 260 bp, Unknown
  Description of Unknown: RightRegion for integrase B7403 sequence
ataatatcaaaaattgtaattggcaagggaaatatagaaattcagttaaaaactttttagcagaaactatacgccagaggtgtgacatatagtaagtgctaatgccgtatttatcacgtttttaagctagtgaaccatcagaattataatgggttttgtttattttgcattttaaattgacctaacaagacataagtgtttgcataaaaaatattttattgtataatgagaatacggaggtgcaagcaaatggatattga

SEQ ID NO: 33403 - DNA, 260 bp, Unknown
  Description of Unknown: RightRegion for integrase B7404 sequence
ctgaaatgcatcgttttcgaccggaagaccgagcattttgattttcaatattatgcatgaaatagcggagaaccttgaaaaataaggctctccgcttattataggttactgcactttagaccgccatactggctcattacatattgcgcgatcttcggattcggcgtcttgatattgactggatattgtaatcttttttcatatctccacatacgctacacctccccttcccacggccagcgctctgtaagccaggacca

SEQ ID NO: 33404 - DNA, 260 bp, Unknown
  Description of Unknown: RightRegion for integrase B7405 sequence
ataaaacggatcatcttacagaaaaacggagaaattattataaaatggagggtaaaataatataattctattgacaatatttaaaatgtacgttataatgtacatataataagataggaggaaaacaaatgtctattacgaatgctactactttgcgtaaaaacctgttcgggtatttagacgcggctgctgtcaacgacgagacgattattgtcacgacgaaaaatggcaatgcagcgattatcagcgaagagtatctg

SEQ ID NO: 33405 - DNA, 260 bp, Unknown
  Description of Unknown: RightRegion for integrase B7406 sequence
ataaaacggatcatcttacagaaaaacggagaaattattataaaatggagggtaaaataatataattttgattgaaagaaaacaaatgcttattatgaatgcaaccactttgcgtaaaaacctgtccggctatttggacgcggccgctgtaaacgacgagacgattattgtcacgacgaaaaatggcaatgcagcgattatcagcgaagagtatctgcgcagtttggaagaaacttgttatttatgcagcatcccctgga

SEQ ID NO: 33406 - DNA, 109 bp, Unknown
  Description of Unknown: RightRegion for integrase B7407 sequence
acgctgttggtggtgttcctggatgggactgagattgaatgtagaagtgaaaaagaataatagaatacaccagctaaaataaattattttggttggtgtatttttattg

SEQ ID NO: 33407 - DNA, 260 bp, Unknown
  Description of Unknown: RightRegion for integrase B7408 sequence
ataaaagaaatacatcttaatgcagataacagtttcgtaaactttatcgattttctttgacgctcttttgtttgtattaactttcgctcccccaaccgcgagtgggggtatggcgcgctggatctgttccagacatttcttcatctgagggaataaatccgcggaaaaaattgcggatacaaacttatggggatcatccgtgtaatatcagccgcgcattcggatcagcggcccgccgctcttctccaggtacggacggg

SEQ ID NO: 33408 - DNA, 72 bp, Unknown
  Description of Unknown: RightRegion for integrase B7409 sequence
tatataaggaaagtaatacataagatagttatagatgaaaatgagatagttatatattaattgttatttgga

SEQ ID NO: 33409 - DNA, 260 bp, Unknown
  Description of Unknown: RightRegion for integrase B7410 sequence
actatcataaaagaaatagttgtcacaaaggatgatatgacgctaacgctagacttctaaggggtttagcgtctttctgttatttagtcaagctaattaagataagttagagttagtaacattattttcaacttcatacatctgcaatgaatgaaacacgagatcacgatatttccaagtgctgaccagatactcaatcacctcctggtcctctatcttgcattccatgagaagtaatagcttgaccgtgtacttatttt

SEQ ID NO: 33410 - DNA, 260 bp, Unknown
  Description of Unknown: RightRegion for integrase B7411 sequence
acactaatcgagaagatagtgattgatggcgaggatttggagatatattggaaattctaaaaaactatagccaatcgtaaccctgtattcgtcacagagtcgtgtagtatggatattcttaaattctctgtttccgcttctaataaagggttattttgattaaactgaacattcattaggttgcttattcgtgtataaaactgttttataaaaatatcatctaatttgaaattgttaactttatatcttcctttttccaa

SEQ ID NO: 33411 - DNA, 140 bp, Unknown
  Description of Unknown: RightRegion for integrase B7412 sequence
agcataagaaatataatagattatatagaatttgatggtgattactttacaatatactaattatgtctctttgaagaactttgcggttccttgatctaaagcaataatatatcttttcataattaattttctactccttt

SEQ ID NO: 33412 - DNA, 260 bp, Unknown
  Description of Unknown: RightRegion for integrase B7413 sequence
gttgaaagtatcgtattttcacggcctaatactgctataaaaatttatttccgcctctaattatacgcatttgaagtatggaggtcctcacggcgagctcggagcttcgctgcgctacctttctcagcgctgttccatgccgtacagagaagtagccggaatactcaacgacgtgggtagtgaagcccctaaaatgttccttttaggggctaatgctttttttgacgctttcgccaccgtataactccatttcaaaggga

SEQ ID NO: 33413 - DNA, 260 bp, Unknown
  Description of Unknown: RightRegion for integrase B7414 sequence
ggactactagaatccatcaccgtagacggacgcaagatatccctcaaatggcgcatttagagcggtttcttagactttcacaaatttatatgtactacgtgcatggccttcggctgtaacgccgctggagtaatcggttgccgcattattgattcaccgcgggaacggctgattgccattttaactaacagtttcactccctgcaatggccgcctgcccatgctgattgccctgctgactatgttttttgccgccagcaa

SEQ ID NO: 33414 - DNA, 260 bp, Unknown
  Description of Unknown: RightRegion for integrase B7415 sequence
tatataaggaaagtaataaataagatagttatagatgaaaatgagatagttatatattaattgttatttggagcgtataggtgaacctacaaagtcaaaataacaattaaaaaaagagggtactatttaccctctaatttcttgtttatttcatctaattttcttataataatccagttctgatttattaatatttcattctgttgtattaaagtattttgtatagagtcaccttttaaaatagcttgtactttcaagaa

SEQ ID NO: 33415 - DNA, 260 bp, Unknown; identical to SEQ ID NO: 33273
  Description of Unknown: RightRegion for integrase B7416 sequence

SEQ ID NO: 33416 - DNA, 109 bp, Unknown
  Description of Unknown: RightRegion for integrase B7417 sequence
gttgaaaaaatagtgctgcatcgtccctcaaatgaaattgaaattttttatcattattaattatctcttaaaacaatgcgctccaccatattgactaatgataattttt

SEQ ID NO: 33417 - DNA, 170 bp, Unknown
  Description of Unknown: RightRegion for integrase B7418 sequence
gaagatatcgtttatgacaagaaaaacagcaagctgatattccatctttatatctcgtaagccctctgtttataagggtttgcggatatgttataggttactgcaatatgggccgccaaattgtgaaatgatcactttggcaatctgtgggttcgtttgtgtaatcttta

SEQ ID NO: 33418 - DNA, 260 bp, Unknown
  Description of Unknown: RightRegion for integrase B7419 sequence
acattaattaaacgtgtagaggtaaagcgtgatgaaatcgacgttatttttaaattgtaaaattacagtatttaggagcacctactaatattgttgtgcatgccataatatgcttctccttttactttctataattcatccgcaattttattaattttacgtaatctgtggttaacaccactcttggtcaatgtgccttccaaatggtcggcaatttgttgaatggaataatctggattttcaacacggattttagccac

SEQ ID NO: 33419 - DNA, 260 bp, Unknown
  Description of Unknown: RightRegion for integrase B7420 sequence
gaggatatcgtttatgataagaaaaacggaaaactgatcttccatctttacatatcgtgagccctctgtttataagggtttgcggatatgttataggttactgcaatcagggccaccaaatagcaataacctataatatttttacatattataaatatacacgaaaatgatacaatattcgcccctcagagagttgatctccgaggggattttgttaaatcttttttacaggttctcgatacagaggctccatcgctctc

SEQ ID NO: 33420 - DNA, 260 bp, Unknown
  Description of Unknown: RightRegion for integrase B7421 sequence
gaagatatcgtttatgacaagaaaaacagcaagctgatattccatctttatatctcgtaagccctctgtttataagggtttgcggatatgttataggttactgcaatatgggccaccaaattgtgaaatgatcactttggcaatctgtgggttcgtttgtgtaatctttaccggatattgcaatcgtttttcataattccacataatcagcatcctccttcctgccacggccacggctcattgatccatttccagtattc

SEQ ID NO: 33421 - DNA, 260 bp, Unknown
  Description of Unknown: RightRegion for integrase B7422 sequence
gattatattgttcaagatgcggatgatccagtaaataattggcatgttttttttaagtaaatcgtgtgcataacactcaatgtccatgagttaatattaaataatctattttttttattcctgatgatctaaaataaggtatcaatacattttttgatatattaaaatttatattaccacctgtatctattaatatatttttgcttttaattctaattaaaatagaatctccctgacctacatctaaaaaatgaacttca

SEQ ID NO: 33422 - DNA, 260 bp, Unknown
  Description of Unknown: RightRegion for integrase B7423 sequence
gtacgtcaaattgtttacatgaagaaaacccaatctattgaaattctttatcaaatataaattatctccttttacaactaggaccgccaaattacaaaaggagatatataattgaataccacaaaataccagtggacttacttcttccctcctgctataatagacataaaggagggatttttttgaatattgctatatgtgacgacgagcctgtttttgtagattatttttcgaaaatcgtaaacgaatactttgaggaa

SEQ ID NO: 33423 - DNA, 260 bp, Unknown
  Description of Unknown: RightRegion for integrase B7424 sequence
gaagatatcgtttatgacaagaaaaacggcaaactgatcttccatctttacatatcgtgagccctctgtttataagggtttgcggatatgttataggttactgcaatccgggccgccaaattgtgaaatgatcactttggcaatctgtgggttcgtttgtgtaatctttaccggatattgcaatcgtttttcataattccacataatcagcatcctccttcctgccacggccacggctcattgatccatttccagtattc

SEQ ID NO: 33424 - DNA, 260 bp, Unknown
  Description of Unknown: RightRegion for integrase B7425 sequence
gaccagattgtatatgacaaagaatccggtaagatgtactttgacattatcgtatcatgattccagttcttctttttcccctataaagagcccggaacacgcataaatactgggtttgtggcactattatagggtattgcagtccgggccaccatactgactcatgatgaactgggcgatctttgcatttggagtcttaatatttaccggatactgcagtcttttttcataattccacataaactatctgcaccctcctt

SEQ ID NO: 33425 - DNA, 109 bp, Unknown
  Description of Unknown: RightRegion for integrase B7426 sequence
gaggatatcgtttatgacaagaaaaacggcaaactagtcttccatctttacatatcgtgaaccctctgtttataagggtttgcggatatgttataggttactgcaatcc

SEQ ID NO: 33426 - DNA, 260 bp, Unknown
  Description of Unknown: RightRegion for integrase B7427 sequence
gaagatatcgtttatgacaagaaaaacggcaaactagtcttccatctttacatatcgtgaaccctctgtttataagggtttgcggatatgttataggttactgcaatccggtccaccaaattgtgaaatgatcactttggcaatctgtgggttcgtttgtgtaatctttaccggatattgcaatcgtttttcataattccacataatcagcatcctccttcctgccacggccacggctcattgatccatttccagtattc

SEQ ID NO: 33427 - DNA, 260 bp, Unknown
  Description of Unknown: RightRegion for integrase B7428 sequence
gaagatatcgtttatgacaagaaaaacagcaagctgatattccatctttatatctcgtaagccctctgtttataagggtttgcggatatgttataggttactgcaatatgggccgccaaattgtgaaatgatcactttggcaatctgtgggttcgtttgtgtaatctttaccggatattgcaatcgtttttcataattccacataatcagcatcctccttcctgccatggccacggctcattgatccatttccagtattc

SEQ ID NO: 33428 - DNA, 260 bp, Unknown
  Description of Unknown: RightRegion for integrase B7429 sequence
gaggatatcgtttatgacaagaaaaacggcaaactagtcttccatctttacatatcgtgagctctctgtttataagggtttgcggatatgttataggttactgcaatacgggccgccaaattgtgaaatgatcactttggcaatctgtgggttcgtttgtgtaatctttaccggatattgcaatcgtttttcataattccacataatcagcatcctccttcctgccatggccacggctcattgatccatttccagtattc

SEQ ID NO: 33429 - DNA, 260 bp, Unknown
  Description of Unknown: RightRegion for integrase B7430 sequence
gattatattgttcaagatgcggaggatccagtaaataattggcatgttttttttaagtaaatcgtgtgcataacactcaatgtccatgagttaatattaaataatctattttttttattcctgatgatctaaaataaggtatcaatacattttttgatatattaaaatttatattaccacctgtatctattaatatatttttgcttttaattctaattaaaatagaatctccctgacctacatctaaaaaatgaacttca

SEQ ID NO: 33430 - DNA, 260 bp, Unknown
  Description of Unknown: RightRegion for integrase B7431 sequence
gaccagattgtttatgacaaagaatccggtaagatgtactttgacattatcgtatcgtaattataataccttattctcccttacataatgcctgaaagccgcataaatactggctttgcggcactattatagggtattacagtccgggccaccatactgactcatgatgaactgggcgatctttgcatttggagtcttaatatttaccggatactgcagtcttttttcataattccacataaactatctgcaccctcctt

SEQ ID NO: 33431 - DNA, 113 bp, Unknown
  Description of Unknown: RightRegion for integrase B7432 sequence
gaagatattgtttatgacaaggagaacggtaagctgattttccatctttattcctcgtaaagccctctgttgtgggctttacattatattatatgtttttgcattatggtggt

SEQ ID NO: 33432 - DNA, 260 bp, Unknown
  Description of Unknown: RightRegion for integrase B7433 sequence
gaagatatcgtttatgacaagaaaaacggcaaactgatcttccacctttatatctcgtgagccctctgtttataagggtttacggatatgttataggttactgcaatcagggccgccaaattgtgaaatgatcactttggcaatctgtgggttcgtttgtgtaatctttaccggatattgcaatcgtttttcataattccacataatcagcatcctccttcctgccatggccacggctcattgatccatttccagtattc

SEQ ID NO: 33433 - DNA, 109 bp, Unknown
  Description of Unknown: RightRegion for integrase B7434 sequence
atgttggtatcaagagttgaagtcacgcctgatgaaattaggcttatttttaaattgtaaaatattaggatttagtcccgaccatcaagtttggcgcaaagacgcgcat

SEQ ID NO: 33434 - DNA, 260 bp, Unknown
  Description of Unknown: RightRegion for integrase B7435 sequence
gaggatatcgtttatgacaagaaaaacggcaaactgatcttccacctttatatctcgtgagccctctgtttataagggtttacggatatgttataggttactgcaatccgggccgccaaattgtgaaatgatcactttggcaatctgtgggttcgtttgtgtaatctttaccggatattgcaatcgtttttcataattccacataatcagcatcctccttcctgccatggccacggctcattgatccatttccagtattc

SEQ ID NO: 33435 - DNA, 260 bp, Unknown; identical to SEQ ID NO: 33420
  Description of Unknown: RightRegion for integrase B7436 sequence

SEQ ID NO: 33436 - DNA, 109 bp, Unknown
  Description of Unknown: RightRegion for integrase B7437 sequence
gaccagattgtatatgacaaagaatccggtaagatgtactttgacattatcgtatcatgattccagttcttcttttccccttataaagtgcccgaaaccagcataaata

SEQ ID NO: 33437 - DNA, 260 bp, Unknown
  Description of Unknown: RightRegion for integrase B7438 sequence
cgccctcaaccgagagcgggagaaaattttatcagaacctgttcagtcccttgcggataatagccgcaggaaaatcacgatagcagcagtccatgtcaacattacccttaataccataaaccttgcccttccagctgtactgccagatgcctacgtcgtcagcagagatgcacttggggaaaatgttctccactctcgcaacccagcaggtgtaacgcttgggcatgtcagcgctcagcttgtccctgaaaaatgtgtca

SEQ ID NO: 33438 - DNA, 260 bp, Unknown
  Description of Unknown: RightRegion for integrase B7439 sequence
gaagatattatttatgacaaagaaaatggaaagatgattttccacctttattcctcataaatcccactgttgtgggatttatgatatattataggtttttgcaatatggtggtcctgacggagaactcgctgcatctatgcgctatctctcccagagatatacgatgccataccgggaagtgatcggaactttaacagacatcggtaccgaggaattagcaccatcttgttatctgtaacaattacatataaataagtaa

SEQ ID NO: 33439 - DNA, 109 bp, Unknown
  Description of Unknown: RightRegion for integrase B7440 sequence
gttgaaaaaatagtgctgcattgcccttcaaacgaaattgaaattttttatcattattgattatctcttaaaacaatatgcaccaccatattgactaatgataattttt

SEQ ID NO: 33440 - DNA, 260 bp, Unknown
  Description of Unknown: RightRegion for integrase B7441 sequence
gaagatatcgtttatgacaagaaaaacagcaagctgatattccacctttatatctcgtaagccctctgtttataagggtttgcggatatgttataggttactgcaatatgggccgccaaattgtgaaatgatcactttggcaatctgtgggttcgtttgtgtaatctttaccggatattgcaatcgtttttcataattccacataatcagcatcctccttcctgccacggccacggctcattgatccatttccagtattc

SEQ ID NO: 33441 - DNA, 109 bp, Unknown
  Description of Unknown: RightRegion for integrase B7442 sequence
gaccagattgtttatgacaaagaatccggcaagatgtactttgacattatcgtatcgtaattataataccttattctcccttacataatgcctgaaagccgcataaata

SEQ ID NO: 33442 - DNA, 260 bp, Unknown
  Description of Unknown: RightRegion for integrase B7443 sequence
gaccagattgtatatgataaagaatccgggaaaatgtattttgatattatagtgtcgtagtcaaagcccttttcgttctctccaagatccgcaaagccgcataaatactagctttctggcactatcatagggtatcgtgaactggtcccccatactgactcataatatactgagcaatttttgcattgggagttttgatgttaacaggatactgtaatcttttttcataattccacatttacctgcaacctccttcctgt

SEQ ID NO: 33443 - DNA, 109 bp, Unknown; identical to SEQ ID NO: 33433
  Description of Unknown: RightRegion for integrase B7444 sequence

SEQ ID NO: 33444 - DNA, 260 bp, Unknown
  Description of Unknown: RightRegion for integrase B7445 sequence
gaagatatcgtttatgacaagaaaaacggcaaactgatcttccatctttacatatcgtgagccctctgtttataagggtttgcggatatgttataggttactgcaatccgggccgccaaattgtgaaatgatcactttggcaatctgtgggttcgtttgtgtaatctttaccggatattgcaatcgtttttcataattccacataatcagcatcctccttcctgccatggccacggctcattgatccatttccagtattc

SEQ ID NO: 33445 - DNA, 260 bp, Unknown
  Description of Unknown: RightRegion for integrase B7446 sequence
gaagatatcgtttatgacaagaaaaacagcaagctgatattccatctttatatctcgtaagccctctgtttataagggtttgcggatatgttataggttactgcaatatggtccaccaaattgtgaaatgatcactttggcaatctgtgggttcgtttgtgtaatctttaccggatattgcaatcgtttttcataattccacataatcagcatcctccttcctgccacggccacggctcattgatccatttccagtattc

SEQ ID NO: 33446 - DNA, 260 bp, Unknown
  Description of Unknown: RightRegion for integrase B7447 sequence
attgcagagatccggctaaatgaagacagcagcttcgttaaaagcatcgaactcatttagccgtgagttgtattaaccttaccgcacccaaccgagagtggggatacggtacgctggatctctatcagacctttttacgtatcagagaataaattaatgatagcctctcattcggatgagaggacctccgtttttatcgaggtatgctctcgtaatgacgacggaaccgatctcggggtccttcgggatttcatacatga

SEQ ID NO: 33447 - DNA, 260 bp, Unknown
  Description of Unknown: RightRegion for integrase B7448 sequence
gaggatatcgtttacgacaagaaaaacggcaaactgatcttccacctttacatatcgtgagccctctgtttataagggtttgcggatatgttataggttactgcaatccgggccaccaaatagcaataacctataatatttttacatattataaatatacacgaaaatgatacaatattcaggacggcaactccatccgcccaacactcatatacgctgcacgtaaaaaggtgtgcatcatttcggttgtcaggatcatc

SEQ ID NO: 33448 - DNA, 109 bp, Unknown
  Description of Unknown: RightRegion for integrase B7449 sequence
acattaattaaacgtgtagaagttaaacgtgatgaaatcaacattatttttaaattgtaaaattacagtatttaggagcaccgactaatatagttgtacatgccataat

SEQ ID NO: 33449 - DNA, 260 bp, Unknown
  Description of Unknown: RightRegion for integrase B7450 sequence
gaggatatcgtttatgacaagaaaaacggcaaactagtcttccatctttacatatcgtgaaccctctgtttataagggtttgcggatatgttataggttactgcaatccagtccgccaaattgtgaaatgatcactttggcaatctgtgggttcgtttgtgtaatctttaccggatattgcaatcgtttttcataattccacataatcagcatcctccttcctgccacggccacggctcattgatccatttccagtattc

SEQ ID NO: 33450 - DNA, 109 bp, Unknown
  Description of Unknown: RightRegion for integrase B7451 sequence
acattaattaaacgtgtagaagttaaacgtgatgaaatcaacgttatttttaaattgtaaaattacagtatttaggagcacctactaatatagttgtacatgccataat

SEQ ID NO: 33451 - DNA, 113 bp, Unknown
  Description of Unknown: RightRegion for integrase B7452 sequence
gaagatatcgtttatgacaagaaaaacagcaagctgatattccatctttatatctcgtaagccctctgtttataagggtttgcggatatgttataggttactgcaatatgggc

SEQ ID NO: 33452 - DNA, 260 bp, Unknown; identical to SEQ ID NO: 33432
  Description of Unknown: RightRegion for integrase B7453 sequence

SEQ ID NO: 33453 - DNA, 260 bp, Unknown
  Description of Unknown: RightRegion for integrase B7454 sequence
gaggatatcgtttatgacaagaaaaacggcaaactgatcttccacctttatatctcgtgagccctctgtttataagggtttacggatatgttataggttactgcaatccgggccaccaaatagcaataacctataatatttttacatattataaatatacacgaaaatgatacaatattcacccctcagagagctgatctccgagggggtttttattagaacaactggaaccgatcgattgcctgtccgaacgctccagc

SEQ ID NO: 33454 - DNA, 260 bp, Unknown; identical to SEQ ID NO: 33432
  Description of Unknown: RightRegion for integrase B7455 sequence

SEQ ID NO: 33455 - DNA, 260 bp, Unknown
  Description of Unknown: RightRegion for integrase B7456 sequence
gaccagattgtctatgacaaagaatccggcaaaatgtactttgacattatcgtatcgtaattttaatcccttcttctcccttataaagtgcctgaaacccgcataaatacaggctttgtggcactattatagggtattacagtccagtccaccagagtgcaataccctataatataataataagctatatataaagcctaaaaagccttataaaacaaggaaaactgagcattttagacagcatctttctgctggcccgg

SEQ ID NO: 33456 - DNA, 260 bp, Unknown
  Description of Unknown: RightRegion for integrase B7457 sequence
gaagatatcgtttatgacaagaaaaacggaaaactgatcttccatctttacatatcgtgagccctctgtttataagggtttgcggatatgttataggttactgcaatatgggccaccaaattgtgaaatgatcactttggcaatctgtgggttcgtttgtgtaatctttaccggatattgcaatcgtttttcataattccacataatcagcatcctccttcctgccacggccacggctcattgatccatttccagtattc

SEQ ID NO: 33457 - DNA, 109 bp, Unknown
  Description of Unknown: RightRegion for integrase B7458 sequence
gaccagattgtatatgacaaagaatccggtaagatgtactttgacattatcgtatcatgattccagttcttcttttccccctataaagtgcccggagcccgcataaata

SEQ ID NO: 33458 - DNA, 260 bp, Unknown
  Description of Unknown: RightRegion for integrase B7459 sequence
ataaaagaaattagagtaatatccttttacccattaaaaatttcaattttattctattaaaaagcaacttttatagagttgcttttttttgttagtatgttatacttttttaaaagaggtgataaaaatggaaaataaaattcaaaaactagttgacattataaaaaattctaaatatcttgttttcttcacaggagcaggagtctctactgatagtggattaaagagttttagaggaaaagacggcttgtacagcactc

SEQ ID NO: 33459 - DNA, 141 bp, Unknown
  Description of Unknown: RightRegion for integrase B7460 sequence
atgttggtatcaagagttgaagtcacgcctgatgaaattaggcttatttttaaattgtaaaatattaggatttagtcccgaccatcaagtttggcgcaaagacgcgcatgacttgatagaatgggaaattccatggttcaa

SEQ ID NO: 33460 - DNA, 260 bp, Unknown
  Description of Unknown: RightRegion for integrase B7461 sequence
ggcgagcccagaccttcgcgtggacgcgcctacaaaaactttatcgttgagttttattaattttttgctcgcttaggcataccatttagcgccctgtgcgcccgcgctttgtcatcgggatgccttgtttgcagagcgggcagtcctctggcttgtaggtctcgacgttgaggtgcagcagtgcggtgcacgggacgtcgccgaaattgactttgccgccgctgcggtcgacgagcatgctgacggcgacggggatgccg

SEQ ID NO: 33461 - DNA, 260 bp, Unknown
  Description of Unknown: RightRegion for integrase B7462 sequence
gaccagattgtatatgacaaagaatccggtaagatgtactttgatattatcgtatcgtaattttggtgtgccattttcctctataaagtgcctgaaacccgcataaacactggctttgtggcactattatagggtattgcagtctggtccaccatactgactcatgataaactgcgcaagttttgcattcggtgtctttatattgaccgggtattggagccttttttcataattccacataaattatctgcaacctcctt

SEQ ID NO: 33462 - DNA, 109 bp, Unknown
  Description of Unknown: RightRegion for integrase B7463 sequence
gttgaaaaaatagtgttgcatcgtccctcgaacgaaattgaaattttttattattattaattatctcttaaagcaatacgctccaccatattgactaatgataattttt

SEQ ID NO: 33463 - DNA, 260 bp, Unknown
  Description of Unknown: RightRegion for integrase B7464 sequence
gaccagattgtatatgacaaagaatccggtaaaatgtactttgacattatcgtatcatgattccagttcttcttttccccttataaagtgcccgaaaccagcataaatactgggtttgtagcactattatagggtattacagtccgggccaccagacttcaataccctataataccaaaaattgacatttttcagatgatacaatattctcggcagatgggtacctgccgggagttttttagatcgcgatcagatctttc

SEQ ID NO: 33464 - DNA, 109 bp, Unknown
  Description of Unknown: RightRegion for integrase B7465 sequence
gaccagattgtatatgacaaagaatccggtaaaatgtactttgacattatcgtatcatgattccagttcttcttttccccttataaagtgcccgaaacccgcataaata

SEQ ID NO: 33465 - DNA, 260 bp, Unknown
  Description of Unknown: RightRegion for integrase B7466 sequence
gtacgtcaaattgtttacatgaagaaaacccaatctattgaaattctttatcaaatataaattatctccttttacaactaggactgcaagctggactcagcaagagacggtcaatttctgcgatgtgattccgatttccgctattgtggcaggggcggtgtttacaaagcaaatttatacgggtacaaggatttatacttatacggtcacctgtacatctgttgagctttcggcaagaagtgctcccgattgggactgct

SEQ ID NO: 33466 - DNA, 260 bp, Unknown
  Description of Unknown: RightRegion for integrase B7467 sequence
gaagatatcgtttatgacaagaaaaacagcaagttgatattccatctttatatctcgtaagccctctgtttataagggtttgcggatatgttataggttactgcaatatgggccgccaaattgtgaaatgatcactttggcaatctgtgggttcgtttgtgtaatctttaccggatattgcaatcgtttttcataattccacataatcagcatcctccttcctgccacggccacggctcattgatccatttccagtattc

SEQ ID NO: 33467 - DNA, 109 bp, Unknown
  Description of Unknown: RightRegion for integrase B7468 sequence
gaggatatcgtttatgacaagaaaaacggcaaactgatcttccacctttatatctcgtgagccctctgtttataagggtttacggatatgttataggttactgcaatcc

SEQ ID NO: 33468 - DNA, 260 bp, Unknown
  Description of Unknown: RightRegion for integrase B7469 sequence
gaggatatcgtttatgacaagaaaaacggcaaactgatcttccacctttatatctcgtgagccctctgtttataagggtttacggatatgttataggttactgcaatccgggccaccaaataacaataacctataatatttctacatattataaatatacacgaaaatgatacaatattcaccccctcagagagcagctctctgaggggattttatttagaacaactgaaaccgatcgatcgcctgtccgaacgctccag

SEQ ID NO: 33469 - DNA, 154 bp, Unknown
  Description of Unknown: RightRegion for integrase B7470 sequence
gaccagattgtctatgacaaagaatccggcaagatgtactttgacattatcgtatcgtaattttaatcccttcttctcccttataaagtgcctgaagcccgcataaatacaggatttgtggcactattatagggtattgcagtctggtccacca

SEQ ID NO: 33470 - DNA, 260 bp, Unknown; identical to SEQ ID NO: 33432
  Description of Unknown: RightRegion for integrase B7471 sequence

SEQ ID NO: 33471 - DNA, 260 bp, Unknown
  Description of Unknown: RightRegion for integrase B7472 sequence
gaggatattgtctatgacaagaaaaacggcaaactaatcttccatctttacatatcgtgagccctctgtttataagggtttacggatatgttataggttactgcaatccgggccaccaaataacaataacctataatatttctacatattataaatatacacgaaaatgatacaatattcaccccctcagagagcagctctctgaggggattttatttagaacaactgaaaccgatcgatcgcctgtccgaacgctccag

SEQ ID NO: 33472 - DNA, 109 bp, Unknown
  Description of Unknown: RightRegion for integrase B7473 sequence
gaacccgcccgattcacgttcgagcgggttcgtacaaatttgcgttggtgcgccatatagggttcgaacctacggccttctgctccggaggcagacgctctaatccact

SEQ ID NO: 33473 - DNA, 109 bp, Unknown; identical to SEQ ID NO: 33450
  Description of Unknown: RightRegion for integrase B7474 sequence

SEQ ID NO: 33474 - DNA, 260 bp, Unknown
  Description of Unknown: RightRegion for integrase B7475 sequence
gaagatatcgtttatgacaagaaaaacggcaaactagtcttccatctttacatatcgtgaaccctctgtttataagggtttgcggatatgttataggttactgcaatccggtccgccaaattgtgaaatgatcactttggcaatctgtgggttcgtttgtgtaatctttaccggatattgcaatcgtttttcataattccacataatcagcatcctccttcctgccacggccacggctcattgatccatttccagtattc

SEQ ID NO: 33475 - DNA, 109 bp, Unknown
  Description of Unknown: RightRegion for integrase B7476 sequence
gaagatatcgtttatgacaagaaaaacagcaagctgatattccatctttatatctcgtaagccctctgtttataagggtttgcggatatgttataggttactgcaatat

SEQ ID NO: 33476 - DNA, 109 bp, Unknown
  Description of Unknown: RightRegion for integrase B7477 sequence
gaccagattgtttatgacaaagaatccggtaagatgtactttgacattatcgtatcgtaattataataccttattctcccttacataatgcctgaaagccgcataaata

SEQ ID NO: 33477 - DNA, 109 bp, Unknown; identical to SEQ ID NO: 33476
  Description of Unknown: RightRegion for integrase B7478 sequence

SEQ ID NO: 33478 - DNA, 158 bp, Unknown
  Description of Unknown: RightRegion for integrase B7479 sequence
gaggatatcgtttacgacaaggagaacggtaagatgattttccacctctacgcctcgtaaagcccgctgttgtgggctttataatatattatatgtttttgcagtttggtggtcccgacggcgaactcgccgcatctatgcgttatctttcccagcga

SEQ ID NO: 33479 - DNA, 260 bp, Unknown
  Description of Unknown: RightRegion for integrase B7480 sequence
gaagatatcgtttatgacaagaaaaacagcaagctgatattccatctttatatctcgtaagccctctgtttataagggtttgcggatatgttataggttactgcaatatgggccgccaaattgtgaaatgatcactttggcaatctgtgggttcgtttgtgtaatctttaccggatattgtaatcgtttttcataattccacataatcagcatcctccttcctgccatggccacggctcattgatccatttccagtattc

SEQ ID NO: 33480 - DNA, 260 bp, Unknown
  Description of Unknown: RightRegion for integrase B7481 sequence
gaagatatcgtttacgacaagaaaaacggcaaactgatcttccacctctacatctcgtgagccctctgtttatgggggtttgcgggcatattataggttattgctatatggtggacctgacggagaattggcagcatctatgagatacctgtctcagagatataccatgccgtataaagaagtaactgcgactttaacagatatcggtacatctgtaccgatattgcacacgttacttttcaataaaagatgtttctaaa

SEQ ID NO: 33481 - DNA, 260 bp, Unknown
  Description of Unknown: RightRegion for integrase B7482 sequence
gaggatatcgtttatgacaagaaaaacggcaaactgatcttccacctttatatctcgtgagccctctgtttataagggtttacggatatgttataggttactgcaatccgggccaccaaatagcaataacctataatatttttgcatattataaatatacacgaaaatgatacaatattcaggacggcaactccatccgcccaacactcatatacgctgcacgtaaaaatgtgtgcatcatttcggttgtcaggatcatc

SEQ ID NO: 33482 - DNA, 260 bp, Unknown; identical to SEQ ID NO: 33420
  Description of Unknown: RightRegion for integrase B7483 sequence

SEQ ID NO: 33483 - DNA, 109 bp, Unknown
  Description of Unknown: RightRegion for integrase B7484 sequence
acattaattaaacgtgtagaagttaaacgtgatgaaatcaacgttatttttaaattgtaaaattacagcatttaggagcaccgactaatatagttgtacatgccataat

SEQ ID NO: 33484 - DNA, 109 bp, Unknown
  Description of Unknown: RightRegion for integrase B7485 sequence
gagcagatcatatatgataaggaatccgggaaaatgtcttttgacatcattatttcctgaattgaaaatcccgcaaacccgcataaacactgggtttgcaggtctatta

SEQ ID NO: 33485 - DNA, 260 bp, Unknown
  Description of Unknown: RightRegion for integrase B7486 sequence
gaacagatcatatatgataaggaatctggaaaaatgtcttttgacatcattatttcctgaatttcatccatccataaaaaagtgccatttcagcttttttaacatttttgtaatattttttctgagttaaaaatcccgcaaacccgcataaacactgggttttcatggctattatagggtactgcactccggtggcccggacggtgagatcggcgcttccctgcgttatctttcccagcgttttaccatgccgaaccgaa

SEQ ID NO: 33486 - DNA, 260 bp, Unknown
  Description of Unknown: RightRegion for integrase B7487 sequence
gagcagatcatatatgataaggaatccggaaaaatgtcttttgacatcattatttcctgaatttcatccatccataaaaaagtgccatttcagccttttaacatttttgtaatattttttcagaattgaaaatcccgcaaacccgcataaacactgggtttgcgaggctattatagggtactgcactctggtggcccggacggggagatcggcgcttccctgcgttatctttcccagcgttttaccatgccgaaccgaac

SEQ ID NO: 33487 - DNA, 260 bp, Unknown
  Description of Unknown: RightRegion for integrase B7488 sequence
gagcagatcatatatgataaagaatccgggaaaatgtcttttgacatcattatttcctgaatttcagacctctataaaaagtgccatttcggtcattttaacactttcgtaatattttttcagaattgaaaatcccgcaaacccacataaacactgggtttgcaggtctattatagggtactgcactccggtggcccggatagcaataccctataatataaaaataccgaaaaatgatacaatatcttatgggtaagggt

SEQ ID NO: 33488 - DNA, 260 bp, Unknown
  Description of Unknown: RightRegion for integrase B7489 sequence
gaacagatcatatatgataaggaatccggaaaaatgtcttttgacatcattatttcctgaattgaaaatcctgcaaacccgcataaacactgggtttgcaggtctattatagggtactgcactccggtggcccggacggtgagattggcgcttccctgcgttatctttcccagcgttttaccatgccgaaccgaacgacttctgctttgctcaacgacataggaacagaagaactcagtcatctggaaatggtatccact

SEQ ID NO: 33489 - DNA, 260 bp, Unknown
  Description of Unknown: RightRegion for integrase B7490 sequence
gagcagatcatatatgataaagaatccggaaaaatgtcttttgacatcattatttcctgaatttcagacctctataaaaagtgccatttcggtcattttaacactttcgtaatattttttcagaattgaaaatcccgcaaacccgcataaacactggggttgcggggctattatagggtactgcactccggtggcccggacggtgaaatcagcgcttccctgcgttatctttcccagcgttttaccatgccgaaccgaac

SEQ ID NO: 33490 - DNA, 109 bp, Unknown
  Description of Unknown: RightRegion for integrase B7491 sequence
gagcagatcgtatacgataagaaaaccggtaagatgtactttgatattatcgtcccgtgattttttgtatggtactgcactacggcggtcccgacggtgaaattggtgc

SEQ ID NO: 33491 - DNA, 132 bp, Unknown
  Description of Unknown: RightRegion for integrase B7492 sequence
gaacagatcatatatgataaggaatccggaaaaatgtcttttgacatcattatttcctgaattgaaaatcccgcaaacccgcataagcacttggttttcggggctattatagggtactgcactccggtggcc

SEQ ID NO: 33492 - DNA, 260 bp, Unknown
  Description of Unknown: RightRegion for integrase B7493 sequence
gaacagatcatatatgataaggaatccggaaaaatgtcttttgacatcattatttcctgaattgaaaatcccgcaaacccgcataaacactgggtttgtggggctattatagggtactgcactccggtggcccggacggggagatcggcgcttccctgcgttatctttcccagcgttttaccatgccgaaccgaacgacttctgctttgctcaacgacataggaacagaagaactcagtcatctggaaatggtatccact

SEQ ID NO: 33493 - DNA, 260 bp, Unknown
  Description of Unknown: RightRegion for integrase B7494 sequence
gagcagatcatatatgataaggaatccggaaaaatgtcttttgacatcattatttcctgaatttcagccatccataaaaaagtgctatttcagtctttttaacatttttgtaatattttttctaagttggaaatcccgcaaacccgcataaacactgggtttgcggggctattatagggtactgcactccggtggcccggacggggagattggcgcttccctgcgttatctttcccagcgttttaccatgccgaaccgaa

SEQ ID NO: 33494 - DNA, 260 bp, Unknown
  Description of Unknown: RightRegion for integrase B7495 sequence
gaacagatcatatatgataaggaatccggaaaaatgtcttttgacatcattatttcctgaatttcagacctctataaaaagtgccatttcggtcattttaacactttcgtaatattttttcagaattgaaaatcccgcaaacccgcataaacactggggttgcggggctattatagggtactgcactccggtggcccggacggtgagatcggcgcttccctgcgttatctttcccagcgttttaccatgccgaaccgaac

SEQ ID NO: 33495 - DNA, 109 bp, Unknown
  Description of Unknown: RightRegion for integrase B7496 sequence
agaatagtattaaaaaaagaagatagatatacattagaagtagatatacaatttatataaattatatatctataaaaaaataaattttactgtaacattttatcgtgtt

SEQ ID NO: 33496 - DNA, 109 bp, Unknown
  Description of Unknown: RightRegion for integrase B7497 sequence
gaacagatcatatatgataaggaatccggaaaaatgtcttttgacatcattatttcctgaatttcatccatccataaaaaagtgctatttcggcctttttaacattttt

SEQ ID NO: 33497 - DNA, 260 bp, Unknown
  Description of Unknown: RightRegion for integrase B7498 sequence
atcaaaaatatcatagttgacggcagcagaatcacagtaaatttacggctcaaaaaataattcaacttaaaaaaagaggcttttttataacaaaaacctcttttttttcttgacaaatatatttaacggctctaaaatagaggtgaagctcagaaaaattgaatagtccattggcgcaataatgaagtaacgctataaatattaacttcaatagggcgataaaatattatatcggaaacataagctcaatatcgaaatcc

SEQ ID NO: 33498 - DNA, 109 bp, Unknown
  Description of Unknown: RightRegion for integrase B7499 sequence
gaacagatcatatatgataaggaatccggaaaaatgtcttttgacatcattatttcctgaatttcatccatccataaaaaagtgctttttcagcctttttaacattttt

SEQ ID NO: 33499 - DNA, 260 bp, Unknown
  Description of Unknown: RightRegion for integrase B7500 sequence
gaagaaatcatttatgacaaagaaaaaaactctttagccttccatctataccgttcctaaattggtgactgtctgaaaacccagtatttatgcgggtttcagcgtgttgtagggtaccgtgataagggggccccgacggcgaaattggtgcttcgatgcgctatctatcacagcgtttcgccatgccaaaccgtactgcaatggcagttttaaacgatgtcggcacagaagagctagctcatttagagatggtgtccact

SEQ ID NO: 33500 - DNA, 109 bp, Unknown
  Description of Unknown: RightRegion for integrase B7501 sequence
gaacagattgtctacgataaggcatctgggaaaatgtcatttgacattatcatatcctgaaaattgcttacataaagtaaagtaccattttggcatttttaacactttt

SEQ ID NO: 33501 - DNA, 109 bp, Unknown
  Description of Unknown: RightRegion for integrase B7502 sequence
gagcagattatatatgataaggaatccggaaaaatgtcttttgacatcattatttcctgaattgaaaatcccgcaagcccgcataaacactagggttgcgggactatta

SEQ ID NO: 33502 - DNA, 109 bp, Unknown
  Description of Unknown: RightRegion for integrase B7503 sequence
gagcagatcatatatgataaagaatccgggaaaatgtcttttgacatcattatttcctgaatttcagacctctataaaaagtgccatttcagtcattttaacacttttg

SEQ ID NO: 33503 - DNA, 260 bp, Unknown
  Description of Unknown: RightRegion for integrase B7504 sequence
gaacagatcatatatgataaggaatccggaaaaatgtcttttgacatcattatttcctgaatttcagacttctataaaaagtgccatttcagtcattttaacactttcgtaatattttttcagaattgaaaatcccgcaaacccgcataaacactagggttgcgggactattatagggtactgcactctggtggcccggacggtgagatcggcgcttccctgcgttatctttcccagcgttttaccatgccgaaccgaac

SEQ ID NO: 33504 - DNA, 260 bp, Unknown
  Description of Unknown: RightRegion for integrase B7505 sequence
gaacagatcatatatgataaggaatccggaaaaatgtcttttgacatcattatttcctgaattgaaaatcccgcaaacccgcataaacactagggttgcggaactattatagggtactgcactccggtggcccggacggtgagatcggcgcttccctgcgttatctttcccagcgttttaccatgccgaaccggacgacttctgctttgctcaacgacataggaacagaagaatcagctcatagctgttgtcattttaat

SEQ ID NO: 33505 - DNA, 260 bp, Unknown
  Description of Unknown: RightRegion for integrase B7506 sequence
gagcagatcatatatgataaggaatccggaaaaatgtcttttgacatcattatttcctgaatttcaaccatccataaaaaagtgtcatttcagcctttttaacatttttgtaatattttcccgaactaaaaatcccgcaaactcgcataaacactgggcttgcggggctattatagggtactgcactccggtggcccggacggtgagatcggcgcttccctgcgttatctttcccagcgttttaccatgccgaaccggac

SEQ ID NO: 33506 - DNA, 109 bp, Unknown
  Description of Unknown: RightRegion for integrase B7507 sequence
gagcagatcatatatgataaaggatccggaaaaatgtcttttgacatcattatttcctgaatttcatccctccataaaaaagtgctatttcagcccttttaacattttt

SEQ ID NO: 33507 - DNA, 260 bp, Unknown
  Description of Unknown: RightRegion for integrase B7508 sequence
gaacaaatcatatatgataaggaatccggaaaaatgtcttttgacatcattatttcctgaattgaaaatcccgcaaacccgcataaacactgggtttgcggggctattatagggtactgcactccggtggcccggacggtgaaatcagcgcttccctgcgttatctttcccagcgttttaccatgccgaaccgaacgacttctgctttgctcaacgacataggaacagaagaatcagctcatagctgttatcattttaat

SEQ ID NO: 33508 - DNA, 260 bp, Unknown
  Description of Unknown: RightRegion for integrase B7509 sequence
gaacaaatcatatatgataaggaatccggaaaaatgtcttttgacatcattatttcctgaatttcatccatccataaaaaagtgctatttcggcctttttaacatttttgtaatattttttctgagttaaaaatcccacaaacccgcataaacactgggtttgcggggctattatagggtactgcactccggtggcccggacggtgagatcggcgcttccctgcgttatctttcccagcgttttaccatgccgaaccgga

SEQ ID NO: 33509 - DNA, 260 bp, Unknown
  Description of Unknown: RightRegion for integrase B7510 sequence
gtcattaaagaaataaggattgacaatgaccagaatatcacgggtgttgtttttgggtagtgttgtactaattgaacactacccgtcggttcatctgccagaatcagctgcggacgggtgatcagcgcgcgggcaaccgccgccctctgcttctgtccgccggaaacctcatacggatacttctccagcagcgcgtcgatcccgagcttttcggcaatcggccaaagcctctcctccatctcctgcaccggcgcatctgc

SEQ ID NO: 33510 - DNA, 109 bp, Unknown
  Description of Unknown: RightRegion for integrase B7511 sequence
gaacagatcatatatgataaggaatccggaaaaatgtcttttgacatcattatttcctgaatttcagccatccataaaaaagtgctatttcagcctttttaacattttt

SEQ ID NO: 33511 - DNA, 260 bp, Unknown
  Description of Unknown: RightRegion for integrase B7512 sequence
gaacagatcatatatgataaggaatccggaaaaatgtcttttgacatcattatttcctgaattgaaaatcccgcaaacccgcataaacactgggtttgtggggctattatagggtactgcactccggtggcccggatggtgagattggtgcttctctgcgttatctttcccagcgttttattatgccaaaccggacgacttccgctctgctcaatgacattggaacagaagaactcagtcatctggaaatggtatccacc

SEQ ID NO: 33512 - DNA, 109 bp, Unknown
  Description of Unknown: RightRegion for integrase B7513 sequence
gaacagatcatatatgataaggaatccggaaaaatgtcttttgacatcattatttcctgaatttcatccatccataaaaaagtgctatttcagcctttttaacattttt

SEQ ID NO: 33513 - DNA, 260 bp, Unknown
  Description of Unknown: RightRegion for integrase B7514 sequence
gagcagatcatatatgataaagaatccggaaaaatgtcttttgacatcattgtttcctgaatttcaggcctctataaaaagtgacatttcggtcattttaacactttcgtaatatttttcctgaattggaaatcccgcaaacccgcataaacactgggcttgcggggctattatagggtactgcactccggtggcccggacggggagatcggcgcttccctgcgttatctttcccagcgttttaccatgccgaaccgaac

SEQ ID NO: 33514 - DNA, 222 bp, Unknown
  Description of Unknown: RightRegion for integrase B7515 sequence
attgaaaagatagactgcgacaacttaaagaaagtcttgactatttatttttactcatagccagcaggtcttcaatcaccctgccgcaatcagcagaaatacaaatgctgcggtcttgtatatcctccggcgcagtagcttgaaataagttcacgcatacataatttgcggacttattttttcttactgcgtcttggaacacaaatttaattattactgggg

SEQ ID NO: 33515 - DNA, 260 bp, Unknown
  Description of Unknown: RightRegion for integrase B7516 sequence
gagcagatcgtatacgataaaaaaaccggtaagatgtactttgatatcatcgtcccgtgattttttgtatggtactgcattacggcggtcccgacggggaaattggcgcatctctccgctatctctcccagagatttaccatgccgaaccgcatggctgccgccgttttaaatgatatcggcacggaggaactcgcacacctcgagatggtctccactatcgtccatcagcttacacgagacctctcaatggaagaaatt

SEQ ID NO: 33516 - DNA, 260 bp, Unknown
  Description of Unknown: RightRegion for integrase B7517 sequence
gaacagatcatatatgataaggaatccggaaaaatgtcttttgacatcattatttcctgaattgaaaatcccgcaaacccgcataaacactgggtttgcaggtctattatagggtactgcactccggtggcccggacggggagattggcgcttccctgcgttatctttcccagcgttttaccatgccgaaccgaacgacttctgctttgctcaacgatataggaacagaagaatcagctcatagctgttgtcattttaat

SEQ ID NO: 33517 - DNA, 109 bp, Unknown
  Description of Unknown: RightRegion for integrase B7518 sequence
gaacagatcatatatgataaggaatccagaaaaatgtcttttgacatcattatttcctgaatttcagacctctataaaaagtgccatttcggtcattttaacactttcg

SEQ ID NO: 33518 - DNA, 260 bp, Unknown
  Description of Unknown: RightRegion for integrase B7519 sequence
gagcagatcatatatgataaggaatccggaaaaatgtcttttgacatcattatttcctgaattgaaaatcccgcaaacccgcataaacactgtggttgcgggactattatagggtactgcactccggtggcccggacggggagatcggcgcttccctgcgttatctttcccagcgttttaccatgccgaaccgaacgacttcagctttgctcaacgacataggaacagaagaactcagtcatctggaaatggtatccact

SEQ ID NO: 33519 - DNA, 260 bp, Unknown
  Description of Unknown: RightRegion for integrase B7520 sequence
gagcagatcatatatgataaggaatccggaaaaatgtcttttgacatcattatttcctgaattgaaaattccgcaaacccgcataaacactgggtttgcaggtctattatagggtactgcactccggtggcccggacggggagatcggcgcttccctgcgttatctttcccagcgttttaccatgccgaaccgaacgacttctgctttgctcaacgacataggaacagaagaactcagtcatctggaaatggtatccact

SEQ ID NO: 33520 - DNA, 260 bp, Unknown
  Description of Unknown: RightRegion for integrase B7521 sequence
attgaaaagatagactgcgacaatataaacaaggtcttgactatatatttttattcttaaccgccagcaggtcttcaatcactctgccgcaatcagcagaaatgcaaatactgcggtcttgtatatccactggcgccgctgcttcaaataagttcacgcatatataatttgcggacttattttttcttacggcgtcgtggaacacaaatttaattattactggggtgttaaatccaactccaagttccagaagaacaacc

SEQ ID NO: 33521 - DNA, 260 bp, Unknown
  Description of Unknown: RightRegion for integrase B7522 sequence
gagcagatcatatatgataaagaatccggaaaaatgtcttttgacatcattatttcctgaatttcagacctctataaaaagtgccatttcggtcattttaacactttcgtaatattttttcagaattgaaaatcccgcaaacccgcataaacactgggcttgcggggctattatagggtactgcactctggtggcccggacggtgagattggcgcttccctgcgttatctttcccagcgttttaccatgccgaaccgaac

SEQ ID NO: 33522 - DNA, 260 bp, Unknown
  Description of Unknown: RightRegion for integrase B7523 sequence
gtcattaaagaaataaggattgacaatgaccagaatatcacgggtgttgtttttgggtagtgttgtactaattgaacactacccgtcggctcatcagccaaaattaattcaggatttgttattatcgcgcgtgccactgctgccctttgtttctgtccgcctgacacctcatatggatatttattaagcagcttttcaattccaagcagcgacgctataggtgcaagccttttttccatatccctatagtccacacctga

SEQ ID NO: 33523 - DNA, 260 bp, Unknown
  Description of Unknown: RightRegion for integrase B7524 sequence
gagcagattatatatgataaggaatccggaaaaatgtcttttgacatcattatttcctgaattgaaaatcccgcaagcccgcataaacactagggttgcggggctattatagggtactgcactctggtggcccggacggtgagatcggcgcttccctgcgttatctttcccagcgttttaccatgccgaaccggacgacttctgctttgctcaacgacataggaacagaagaactcagtcatctggaaatggtatccact

SEQ ID NO: 33524 - DNA, 260 bp, Unknown
  Description of Unknown: RightRegion for integrase B7525 sequence
attgaaaagatagactgtgacaacttaaataaagtattgactatttatttttactcatagccagcaggtcttcaatcaccctgccgcaatcagcagaaatacaaatgctgcggtcttgtatatcctccggcgcagtagcttgaaataagttcacgcatatataatttgcggacttattttttcttactgcgtcatggaacacaaatttaattattacgggtgtgttcattccaacgccaagctctaataacaacattttt

SEQ ID NO: 33525 - DNA, 260 bp, Unknown
  Description of Unknown: RightRegion for integrase B7526 sequence
gaacagatcatatatgataaggaatccggaaaaatgtcttttgacatcattatttcctgaatttcagccatccataaaaaagtgctatttcagcctttttaacatttttgtaatattttttctgagttaaaaatcccgcaaacccgcataaacactgggtttgcaggtctattatagggtactgcactccggtggcccggacggggagatcggcgcttccctgcgttatctttcccagcgttttaccatgccgaaccgaa

SEQ ID NO: 33526 - DNA, 260 bp, Unknown
  Description of Unknown: RightRegion for integrase B7527 sequence
gagcagatcatatatgataaggaatccggaaaaatgtcttttgacatcattatttcctgaattgaaaatcccgcaaacccgcataaacactgtggttgcgggactattatagggtactgcactccggtggcccggacggtgagatcggcgcttccctgcgttatctttcccagcgttttaccatgccgaaccgaacgacttctgctttgctcaacgacataggaacagaagaatcagctcatagctgttgtcattttaat

SEQ ID NO: 33527 - DNA, 260 bp, Unknown
  Description of Unknown: RightRegion for integrase B7528 sequence
gagcagattatatatgataaggaatccggaaaaatgtcttttgacatcattatttcctgaattgaaaatcccgcaagcccgcataaacactagggttgcgggactattatagggtactgcactctggtggcccggacggtgagatcggcgcttccctgcgttatctttcccagcgttttaccatgccgaaccggacgacttctgctttgctcaacgatataggaacagaagaatcagctcataaatgttatcattttagt

SEQ ID NO: 33528 - DNA, 260 bp, Unknown
  Description of Unknown: RightRegion for integrase B7529 sequence
gagcagatcatatatgataaggaatccggaaaaatgtcttttgacatcattatttcctgaattgaaaatcccgcaaacccgcataaacactagggttgcggaactattatagggtactgcactccggtggcccggacggtgagatcggcgcttccctgcgttatctttcccagcgttttaccatgccgaaccggacgacttctgctttgctcaacgacataggaacagaagaatcagctcatagctgttgtcattttaat

SEQ ID NO: 33529 - DNA, 260 bp, Unknown
  Description of Unknown: RightRegion for integrase B7530 sequence
gagcagatcatatatgataaggaatccggaaaaatgtcttttgacatcattatttcctgaatttcatccatccataaaaaagtgccatttcagccttttaacatttttgtaatattttttcagaattgaaaatcccgcaaacccgcataaacactgggtttgcgaggctattatagggtactgcactccggtggcccggacggtgagattggcgcttccctgcgttatctttcccagcgttttaccatgccgaaccgaac

SEQ ID NO: 33530 - DNA, 260 bp, Unknown
  Description of Unknown: RightRegion for integrase B7531 sequence
gagcagatcatatatgataaggaatccggaaaaatgtcttttgacatcattatttcctgaatttcaaccatccataaaaagtgtcatttcagcctttttaacatatttgtaatatttttcccgaactaaaaatcccgcaaacccgcataaacgctgggcttgcggggctattatagggtactgcactccggtggcccggatggtgagatcagtgcttctctgcgttatctttcccagcgttttaccatgccgaaccggac

SEQ ID NO: 33531 - DNA, 109 bp, Unknown
  Description of Unknown: RightRegion for integrase B7532 sequence
gagcagattatatatgataaagaatccggaaaaatgtcttttgacatcattatttcctgaatttcagacttctataaaaagtgccatttcagtcattttaacactttcg

SEQ ID NO: 33532 - DNA, 260 bp, Unknown
  Description of Unknown: RightRegion for integrase B7533 sequence
gagcagatcatatatgataaggaatccggaaaaatgtcttttgacatcattatttcctgaatttcatccctccataaaaaagtgctatttcagctcttttaacatttttgtaatatttttcctgagttaaaaatcccgcaaacccgcataaacactgggtttgcgggactattatagggtactgcactccggtggcccggatggtgaaatcagcgcttccctgcgttatctttcccagcgttttaccatgccgaaccgga

SEQ ID NO: 33533 - DNA, 260 bp, Unknown
  Description of Unknown: RightRegion for integrase B7534 sequence
gaacagatcatatatgataaggaatccggaaaaatgtcttttgacatcattatttcctgaattgaaaatcccgcaaacccgcataaacactgggtttgcaggtctattatagggtactgcactccggtggcccggatggtgaaatcagcgcttccctgcgttatctttcccagcgttttaccatgccgaaccggacgacttctgctttgctcaacgacataggaacagaagaactcagtcatctggaaatggtatccact

SEQ ID NO: 33534 - DNA, 260 bp, Unknown
  Description of Unknown: RightRegion for integrase B7535 sequence
gaacagatcatatatgataaggaatccggaaaaatgtcttttgacatcattatttcctgaattgaaaatcctgcaaacccgcataaacactgggtttgcaggtctattatagggtactgcactccggtggcccggacggtgagattggcgcttccctgcgttatctttcccagcgttttaccatgccgaaccggacgacttctgctttgctcaacgacataggaacagaagaactcagtcatctggaaatggtatccact

SEQ ID NO: 33535 - DNA, 260 bp, Unknown
  Description of Unknown: RightRegion for integrase B7536 sequence
ttcttggaatccacttacgtactaactgatactgacggacgcgctagcttcaggcgctagtggtagcaataccgtggaagttcgagtcttctcggccgcatctttgagtgatctttctagatcactcttttttgttcttctgataaatatatcattgccaaaaagaacatacgtttgtacaatatatattgatagaacttctctattttgttctctgtacatgtttataattttacactgtaacttcttaattaatggaa

SEQ ID NO: 33536 - DNA, 260 bp, Unknown
  Description of Unknown: RightRegion for integrase B7537 sequence
gagcagatcatatatgataaggaatccggaaaaatgtcttttgacatcattatttcctgaattgaaaatcccgcaaacccgcataaacactgggtttacaggtctattatagggtactgcactccggtggcccggacggtgagatcggcgcttccctgcgttatctttcccagcgttttaccatgccgaaccggacgacttctgctttgctcaacgacataggaacagaagaatcagctcatagctgttgtcattttaat

SEQ ID NO: 33537 - DNA, 260 bp, Unknown
  Description of Unknown: RightRegion for integrase B7538 sequence
gaacagatcatatatgataaggaatccggaaaaatgtcttttgacatcattatttcctgaatttcatccatccataaaaaagtgctatttcagcctttttaacatttttgtaatattttttcagaattgaaaatcccgcaaacccgcataaacactgggtttgcaggtctattatagggtactgcactccggtggcccggacggtgagatcggcgcttccctgcgttatctttcccagcgttttaccatgccgaaccgaa

SEQ ID NO: 33538 - DNA, 109 bp, Unknown
  Description of Unknown: RightRegion for integrase B7539 sequence
gaacagatcatatatgataaggaatccggaaaaatgtcttttgacatcattatttcctgaattgaaaattccgcaaacccgcataaacactgggtttgcaggtctatta

SEQ ID NO: 33539 - DNA, 109 bp, Unknown
  Description of Unknown: RightRegion for integrase B7540 sequence
gagcagatcatatatgataaagaatccggaaaaatgtcttttgacatcattatttcctgaatttcagacctctataaaaagtgccatttcggtcattttaacactttcg

SEQ ID NO: 33540 - DNA, 166 bp, Unknown
  Description of Unknown: RightRegion for integrase B7541 sequence
gaacagatcatatatgataaggaatccggaaaaatgtcttttgacatcattatttcctgaattgaaaatcccgcaaacccgcataaacactcaatgtcattaacttaaaagcagaagatatttattcctaaaaggattagatatcttctgctttttttgatatgct

SEQ ID NO: 33541 - DNA, 109 bp, Unknown
  Description of Unknown: RightRegion for integrase B7542 sequence
gagcaaatcatatatgataaagaatccggaaaaatgtcttttgacatcattatttcctgaatttcagacctctataaaaagtgccatttcggtcattttaacactttcg

SEQ ID NO: 33542 - DNA, 260 bp, Unknown
  Description of Unknown: RightRegion for integrase B7543 sequence
tacattaagcagattttacttactgaaaacggagagatagacaagattatatttttttagtcttgtcgttgtactttcctatttgctccatttggagcaaacattaaagtacaacagtaaaaaagagcgtcgctttaacgctctttttggttttaacatttttatcttttcgtcgatagctgtaagaataaattcattacgacttttatatcctagttttttcgctaatttgtcaatttagtcgctggcgttccttttct

SEQ ID NO: 33543 - DNA, 109 bp, Unknown
  Description of Unknown: RightRegion for integrase B7544 sequence
gaacagatcatatatgataaggaatccggaaaaatgtcttttgacatcattatttcctgaattgaaaatcccgcaaacccgcataaacactgggttttcggggctatta

SEQ ID NO: 33544 - DNA, 260 bp, Unknown
  Description of Unknown: RightRegion for integrase B7545 sequence
gagcagatcatatatgataaggaatccggaaaaatgtcttttgacatcattatttcctgaatttcatccatccataaaaaagtgctatttcggcctttttaacattttcgtaatattttttctgagttaaaaatcccgcaaacccgcataaacactgagtttgcggggctattatagggtactgcactccggtggcccggacggggagatcggcgcttccctgcgttatctttcccagcgttttaccatgccgaaccgga

SEQ ID NO: 33545 - DNA, 260 bp, Unknown
  Description of Unknown: RightRegion for integrase B7546 sequence
attgaaaagatagactgcgacaacttaaagaaagtcttgactatttatttttactcatagccagcaggtcttcaatcaccctgccgcaatcagcagaaatacaaatgctgcggtcttgtatatcctccggcgcagtagcttgaaataagttcacgcatatataatttgcggacttattttttcttactgcgtcttggaacacaaatttaattattacgggggtgttttttatctttgttacccgtacagaagaaccccag

SEQ ID NO: 33546 - DNA, 260 bp, Unknown
  Description of Unknown: RightRegion for integrase B7547 sequence
cttattgaccatatcatcatcaaagaagatgaaagcatagagatttactgggccttttaattttatgcgtaaagtaagtttatcggtgtacggatatcatgggacatattattcagaaattccgtttttgctttgtttgcattttcggcgacagcatatgctttttcagcttttcttcctgcatacgctctttctttatcagactgtcaatatttcttgttccgactacagccatccttgttccgtcttttttctttacg

SEQ ID NO: 33547 - DNA, 260 bp, Unknown
  Description of Unknown: RightRegion for integrase B7548 sequence
cttattgaccatatcatcatcaaagaagatgaaagcatagagatttactgggccttttaattttatgcgtaaagtaagtttatcggtgtacgaatatcatgtgacatattagacaggaaatccgttttcgccttatttgcattttcagctgtctgtagtgcttctgttgcgatgttctttgcctttttcagttttttattagcttcttccattttcttcatggtctgtaactgaagttcattatttcttttttcatattc

SEQ ID NO: 33548 - DNA, 168 bp, Unknown
  Description of Unknown: RightRegion for integrase B7549 sequence
cttattgaccatatcatcatcaaagaagatgaaagcatagagatttactgggccttttaattttatgcgtaaagtaagtttatcggtgtacggatatcatgggacatattattcagaaattccgtttttgctttgtttgcattttcggcgacagcatatgcttttttc

SEQ ID NO: 33549 - DNA, 260 bp, Unknown
  Description of Unknown: RightRegion for integrase B7550 sequence
gggcaggtcatagtgaagttcttggatggaacagaattagaatgtaagatggagagctaatcaagatattaccttggttagctcttttgatactaaggaatagttactcaaattgatttgcaagcaaagaaaggtagagtcttggagcagaaataagcatatcatgtactttgacaaaacctataaggttacttcctttgagaacgggagcgcccacaatagaatcatatcctaacttagatattaacttgttaggatat

SEQ ID NO: 33550 - DNA, 260 bp, Unknown
  Description of Unknown: RightRegion for integrase B7551 sequence
gagatagatgaaaacaaagagatagtaagagttgatttttttagattaacttcgatgtaacttatattcccctgtaggctcatctgccaatataacagatggatgtgtaaccaatgcacgaccaatggatgctctttgttgctgacctccagacaattcatttggtaaatgtgtttttctgttttctaagcctaaatgtttgatgagttcatttagctctttttcatcaacttttctaccatctaaatctagaggaagcg

SEQ ID NO: 33551 - DNA, 109 bp, Unknown
  Description of Unknown: RightRegion for integrase B7552 sequence
atgttggttcaaaaggtcattattcatgacaattccatagaaattatacttgttgagtagtgttgtatcttgatgtacaacattgctctttattttcaaaaagatcagt

SEQ ID NO: 33552 - DNA, 260 bp, Unknown
  Description of Unknown: RightRegion for integrase B7553 sequence
attgagggcatagctccaccaaaaaaaggacttgcttttcagcaggtcctttttccatgaaattcatttctgcgcaacgcgcaaaatatcttcggccggaaatatttgcgccgcaaatgggaaaagcgccggatgcttcgcacagcgcgccgaatgcgctgtttttctgcacgccggtgcatttttcgcgcagaacatacaaacatccggccctatgcgacagcgcgaacgtcccaagaattaagactaattaagatgcc

SEQ ID NO: 33553 - DNA, 260 bp, Unknown
  Description of Unknown: RightRegion for integrase B7554 sequence
ttaatagatagaatcaccgtatacgatgaccgagttgaaataaaatggtcgtttagctgatcattccggcatcaaatttctttcgtgcctcttcttccaacgtcttttttcgctctatatcacgcttataacaaaggtctttgaccttagtaaatgacttttgttattttaatcaaaaatcaaactgcttttgtaaaaaaagaaggggtacagcctcagccgtacccctacaaatcaataattcttaataatcatcttca

SEQ ID NO: 33554 - DNA, 260 bp, Unknown
  Description of Unknown: RightRegion for integrase B7555 sequence
tgtttcgctccaccacgagattgtgaacaaatactgttcacccatagaattaacccataaaaaatccggcagtgcaaaagctgccaccatgctcccgtagcttagttggttagagcatctgactgttaatcagagggtcgtccgttcgagccggaccggaagcgccattttgctgcgaaagcagctacttgtgtctgtagctcagctggatagagcaattgccttctaagcaatgggtcgggggttcaagtcccttcaga

SEQ ID NO: 33555 - DNA, 260 bp, Unknown
  Description of Unknown: RightRegion for integrase B7556 sequence
ttaatagatagaatcaccgtatacgatgaccgagttgaaataaaatggtcatttagctgatcattccggcatcaaatttctttcgtgcctcttcttccaacgtcttttttcgctctatatcacgcttgtaacaaaggtctttgaccttagtcaatgacttttattattttaatcaaaaatcaaactacttttgtaaaaaagaaggggtacagcctcagccgtaccccctacgaatcaataattcttaataatcatctcca

SEQ ID NO: 33556 - DNA, 109 bp, Unknown
  Description of Unknown: RightRegion for integrase B7557 sequence
gatcagattgtttatgacaaagaagagggcaagatgtactttgacatcattgtttcgtgagaagtttcgtggtttttctctttccaaaagtcctgaaagcactgtaaat

SEQ ID NO: 33557 - DNA, 260 bp, Unknown
  Description of Unknown: RightRegion for integrase B7558 sequence
atgttggttcaaaaggtcattattcatgacaattccatagaaattatacttgttgagtagtgttgtatcttgatgtacaacattgctctttattttcaaaaagatcagtggtcaaacggctcattaatttccctgttttttgattatcataatactcaaacggttgtgtttgaagatgttgatataattcttcacgcatatctgtttcaatattcacgcctaacatatgaccaaaataaaccacaataaattgtaaaaac

SEQ ID NO: 33558 - DNA, 260 bp, Unknown
  Description of Unknown: RightRegion for integrase B7559 sequence
ataatcaagcatatcgtgctgaaaaacgatgaaatttacatagaatggcgaataaaatagccatttctatgttttttttacacttttttacgcccctaaatgaaatagctttgtacaaagttgcttctatagggactaaattaaaacatctaataggagtaaattatgacagaagaaattttaaagaggctcaacgaacttttagatgaaacagatttccctctcgcgaaaacaagtttcctatcaaacattaagctttc

SEQ ID NO: 33559 - DNA, 150 bp, Unknown
  Description of Unknown: RightRegion for integrase B7560 sequence
gaacttattaacaaaataagtgttgaaaaaggccatgtccatgttgattttaggtactaatttgctatttctacaaagtacgttcatcgggacgccgtaagtggaaaagcgcacatccaggtcggtgttgaaattgtcgatggccttgat

SEQ ID NO: 33560 - DNA, 260 bp, Unknown
  Description of Unknown: RightRegion for integrase B7561 sequence
attgaaaaaattcttgttgacccccgcaacaaaactatggatatttatttttttgcctaacggtgtaacaacctgtactggaagcacagggattttcctgcccctgtgggcataacccccaatacgtcccttccctccagaatgctttgaatcagcacatcctgcccgtccctgaacgtgtcatagccaaaatactgttttaatatctcatactgcgtcataatcaaactcctctttgctgctccggtataaaaggccgc

SEQ ID NO: 33561 - DNA, 260 bp, Unknown
  Description of Unknown: RightRegion for integrase B7562 sequence
ggaaaggtcatagtaaagtttttggatggaacagaattagaatgtttgatggagagctgatcagggaattaccttggtttgctctttttatatttgctacaatttgtggtatactaaggtcactataaattgtacataagaggatgaacggttatggaaagactaagaggtgtagtagaacgaattacctatgctaatgaagaaactggatatagtgttattaagataaaatgtaagggatacatggaccttgtaactgt

SEQ ID NO: 33562 - DNA, 260 bp, Unknown
  Description of Unknown: RightRegion for integrase B7563 sequence
aaatcagtgaccctctgtaatgaccattctaacatgatctcatctattctatttttataattagttgtaactacttcaatccacagggaatgaagactgttcagaatcagacgttttcgcctaagattccgtcaggtcacagagtaaaaagggttatagatataagatgtaagaggagcttcaatccttacaatgtagatgatccgtctaatctcaagttagacgttaatacaagtatttcaggcgcaaccttcctgcag

SEQ ID NO: 33563 - DNA, 260 bp, Unknown
  Description of Unknown: RightRegion for integrase B7564 sequence
agaaaacacagaaataaagggggagaaaacaccgaaaattttacgaatgtcagtgcgtgaccgatagcgtccagcagcggaccggaaacgcgctgcagatagcgctcaatggcatagggcgtgcagctgcacgcgcgggtggggtgcccaaaatagccgcatgggcagggattcatccatactcacaattcatataaatttgttcaaaatttccaatcaacttcgaatccaccatcggttatcactatcttattcaccag

SEQ ID NO: 33564 - DNA, 260 bp, Unknown
  Description of Unknown: RightRegion for integrase B7565 sequence
agaaaacacagaaataaagggggagaaaacactgaaaattttacgaatgtcagtgcgtgaccgatagcgtccagcagcggaccggaaacgcgctgcagatagcgctcaatggcatagggcgtgcagctgcacgcgcgggtggggtgcccaaaatagccgcatgggcagggattcatccatacccacaattcgtataaacttgctcaaaatttccaatcaacttcgaatcccccctcggttatcactatcttattcaccag

SEQ ID NO: 33565 - DNA, 84 bp, Unknown
  Description of Unknown: RightRegion for integrase B7566 sequence
tataatgagaacggtaaggtcaatacacttaatataagggaaattacttttaaattttaatggtagtagtgttacagggtaggt

SEQ ID NO: 33566 - DNA, 260 bp, Unknown
  Description of Unknown: RightRegion for integrase B7567 sequence
tataatgagaacggtaaggtcaacacacttaatataagtgagattactttcaaattttaatggtagtagtgttacagggtaggtagcaccggtaccccccatagttgcaacgaacatttgtgtaccaggtgtaataattttatctgcatgttctcctgcttgaatcaaatttaagtttgtttcaagatttgcataagtaattgcagcgattgctggttcaacaatagatggaccatgtatacctacaaaccagaagaatg

SEQ ID NO: 33567 - DNA, 260 bp, Unknown
  Description of Unknown: RightRegion for integrase B7568 sequence
attgaaaaaattcttgttgacccccgcaacaaaactatggatatttatttttttgcctaacggtgtaacaacctgtactggaagcatatccacataccggcatctctttgctttattcgctttttttctttttattaattatgttctccgcagctgtgtccgtgtccatggcagttatgctccccgccctcatggtgatggctgcacacggtatttggatcataaaccaggctgccgcttaacagcgcctccactgcctg

SEQ ID NO: 33568 - DNA, 109 bp, Unknown
  Description of Unknown: RightRegion for integrase B7569 sequence
ttaataaagcatataatacttaaacaagatgaaatttacatagaatggcgaattaagtagccgtttctatgttttttttcgacttttttacgtcccttaatgaaacaac

SEQ ID NO: 33569 - DNA, 260 bp, Unknown
  Description of Unknown: RightRegion for integrase B7570 sequence
agaaaacacaggaataaagggggcgaaaacactgaaaattttacgaatgtcagcgcgtgaccgatagcgtccagcagcggaccggaaacgcgctgcagatagcgctcaatggcatagggcgtgcagctgcacgcgcgggtggggtgcccaaaatagccgcatgggcagggattcatccatacccacaattcgtataaacttgctcaaaatttccaatcaacttcgaatcccccctcggttatcactatcttattcaccag

SEQ ID NO: 33570 - DNA, 115 bp, Unknown
  Description of Unknown: RightRegion for integrase B7571 sequence
ataatcaagcatatcgtgctgaaaaacgatgaaatttacatagaatggcgaataaaatagccatttctatgttttttttacacttttttacgtccctaaatgaaatagctttgta

SEQ ID NO: 33571 - DNA, 260 bp, Unknown
  Description of Unknown: RightRegion for integrase B7572 sequence
ccaccaaaaagctcaacttcgcaagaggttgagcttttttctttttattatacattgtaaggagtagaggagtacgggaatcgaacagcccaggccccgcgtccgcgtcctgcggggcaaaaacagccccgcgggctgtttttagggcgcgggagatggacgggagggtcaccaaagtagtccccaatttcttttacgttttgacgtgtaaccacaatcgtaccaaacttttgaagtaaaaggcaaaacatgcagtatct

SEQ ID NO: 33572 - DNA, 260 bp, Unknown
  Description of Unknown: RightRegion for integrase B7573 sequence
attgaaaaaattcttgttgacccccgcaacaaaactatggatatttatttttttgcctaacggtgtaacaacctgtactggaagcacagggatttcccggccccggtgggcatgactcccagcacgtcccttccttccagaatgctctggatcagcatatcctgcccatccctgaatgtgtcataaccaaaataatgttttaatatttcatattgtgtcatcatcaaactcctctgtattgctccggcataaaagaaccc

SEQ ID NO: 33573 - DNA, 260 bp, Unknown
  Description of Unknown: RightRegion for integrase B7574 sequence
gaacttattaacaaaataagtgttgaaaaagaccatatccatgttgattttaggtactaatttgctatttctacaaagtacgttcatcggtacgccataggtggagaagcgcacatccaggtcggtgttgaagttatcaatggccttgatcaggccgatacaccccacctggaacaggtcgtccacattctccccgcggttggagaatttatggatcaccgacagaaccagccgcagattgccggcgatcagctcttccc

SEQ ID NO: 33574 - DNA, 260 bp, Unknown
  Description of Unknown: RightRegion for integrase B7575 sequence
gtgtgtatgatattctcatctccaacaattatacatacgtgcaaaagaacgaatccctgaagcagatcatcgacaagattatctacgatcgcaagaacgattctcttaaaatctactttttcttatacagataaaatgcccgcaaacccagtaaaatcaagagtttgcgtgtactttataggttataacaatttggttgacccaatggggatccaaatccttaggcgaccagggctattcccctatcgaaattctccgtt

SEQ ID NO: 33575 - DNA, 260 bp, Unknown
  Description of Unknown: RightRegion for integrase B7576 sequence
atcgtggtaaaggacgggcggtacggccacctcgaccttgatgttatttttttgccctaacattgtattagtgtactgtgccgctcggtgccgtccagtctcatgtagaagctgaccgcacaggccgtgccgtcgtcgccctcgtagtcatacatgaacagcgagatgcagtcgttgtacgggtagatattgaagttgtatgcctcgctgtcgtcaatatgctgatccagcacccaatcgctgccgtccagaatcggctc

SEQ ID NO: 33576 - DNA, 109 bp, Unknown
  Description of Unknown: RightRegion for integrase B7577 sequence
attgtggtaaaggacgggcggtacggccattttgaccttgacgttatttttttaccctaacattgtattagtacatcgtgccgcccggaaccggaaaatctatgcttgc

SEQ ID NO: 33577 - DNA, 109 bp, Unknown
  Description of Unknown: RightRegion for integrase B7578 sequence
attgtggtaaaagacgggcggtacggccactacgaccttgacgttatttttttgccctagcattgtattagtgtactgtgccgcccggaaccggaaaatctatgcttgc

SEQ ID NO: 33578 - DNA, 85 bp, Unknown
  Description of Unknown: RightRegion for integrase B7579 sequence
attgtggtaaaagacgggcggtacggccattttgaccttgatgttatttttttaccctaacattgtattagtacatcgtgccgcc

SEQ ID NO: 33579 - DNA, 134 bp, Unknown
  Description of Unknown: RightRegion for integrase B7580 sequence
attgtggtaaaagacgggcggtacggccgttttgaccttgacgttatttttttaccctaacattgtattagtacatcgtgccgccaggtgcgtgcgcttaatacaatgctataaacaggcagagaaaagcccag

SEQ ID NO: 33580 - DNA, 260 bp, Unknown
  Description of Unknown: RightRegion for integrase B7581 sequence
aataaagatgaaatcaatgttaaaactgagaatataaacttaaaaatatttcttaaataaaaaaagctagaaaaaatatctagctttttttattttttaatagtataatattaatacaaataaattttgattataaaaggtgtgaataatattagttcctatctaggcaccactaataaatatagtgtgataattagggggctgttgcaaattaatgatttttaatcattagtttgcaacattttttattttgatgtaaa

SEQ ID NO: 33581 - DNA, 260 bp, Unknown
  Description of Unknown: RightRegion for integrase B7582 sequence
cacctaaagtcggactataccattaactatgttgattttgttcagagtgtctctgtttaaggtgtggatacgtttttccgtatcttacagagaaagtctctgcctaacatgttatccccgtttggagttcacaagttaggcgaagatttaccctcacaaaccgcgtatttccgttattttgaagattttttcttcaaaaatattatcaaaacatatgtttgcttttttcgttatgtttcgtaaaagatgatacaatattt

SEQ ID NO: 33582 - DNA, 122 bp, Unknown
  Description of Unknown: RightRegion for integrase B7583 sequence
cacctaaagccggactataccattaactatgttgattttgttcagagtgtctctgtttaaggtgtggatacgtttttccgtatcttacagagaaagtctctgcctaacatgttatccccgtt

SEQ ID NO: 33583 - DNA, 109 bp, Unknown
  Description of Unknown: RightRegion for integrase B7584 sequence
atcgtggtaaaagacgggcggtacggccactacgaccttgacgttatttttttgccctaacattgtattagtgtactgtgccgcccggaaccggaaaatctatgcttgc

SEQ ID NO: 33584 - DNA, 260 bp, Unknown
  Description of Unknown: RightRegion for integrase B7585 sequence
attgtggtaaaagacgggcggtacggccactacgaccttgacgttatttttttgccctagcattgtattagtgtactgtgccgcccggaaccggaaaatctatgcttgccaagcggctgccgggcattctgccgccgctgacctacgaggaggcgctcgagaccagcgccatctactccgtggccgggctgctgcgcggcggcacggggcttatcaagcagcggcccttccgcagcccgcaccacagcgtcagctcgaca

SEQ ID NO: 33585 - DNA, 260 bp, Unknown
  Description of Unknown: RightRegion for integrase B7586 sequence
atcgtggtaaaggacgggcggtacggccacttcgaccttgatgttatttttttgccctaacattgtattagtacatcgtgccgctcggtgccgtccagcctcatgtagaagctgaccgcacaggccgtaccgtcgtcgccctcgtagtcatacatgaacagcgagatgctgtcgttatacgggtacaggttgaacttatacgcatcgctctcggttatgttctggtcaagcacccagtcgtagccgtccaggataggctc

SEQ ID NO: 33586 - DNA, 260 bp, Unknown
  Description of Unknown: RightRegion for integrase B7587 sequence
tctttcgtgcattccgtcgtggtttatgatgatgagcacatggatatttcatttttgtaaattatttttttgcaaaaatccaccatactaattaatactaaccgttattctgatttacatacttctcccaggcctttgctgcccgctcggcagccgtacttccctcaccggtattcagcgcctggattgcataataattgatcggaatatcgacctctttttcatccagctgcccttccacgatattagctgctgtcacg

SEQ ID NO: 33587 - DNA, 260 bp, Unknown
  Description of Unknown: RightRegion for integrase B7588 sequence
agcattatcgaatcaatttctgtcgatggtcgcaatatctctattcaatggagaatttaatgcaaaattattaaacccatgcatatagataatataaatatgtattatattaacacactttttttgtttaaacaatactttaattacacaaaaaatagcccgcctgccttgattggcaagcgggtaatttttatgtatccattcacattttcggaagattaatatcgttgtccgccagccacccgagtttgattcctctc

SEQ ID NO: 33588 - DNA, 184 bp, Unknown
  Description of Unknown: RightRegion for integrase B7589 sequence
atcgtggtaaaggacgggcggtacggccacttcgaccttgatgttatttttttgccctaacattgtattagtacatcgtgccgctcggtgccgtccagtctcatgtagaagctgaccgcacaggccgtgccgtcgtcgccctcgtagtcatacatgaacagcgagatgctgtcgttatacgggt

SEQ ID NO: 33589 - DNA, 260 bp, Unknown
  Description of Unknown: RightRegion for integrase B7590 sequence
atcgtggtaaaggacgggcggtacggccacttcgaccttgatgttatttttttggcctaacattgtattagtacatcgtgccgctcggtgccgtccagcctcatgtagaagctgaccgcacaggccgtgccgtcgtcgccctcgtagtcatacatgaacagcgagatgcagtcgttgtacgggtagatattgaagttgtatgcttcgctgtcgtcaatatgctgatccagcacccaatcgctgccgtccaggataggctc

SEQ ID NO: 33590 - DNA, 260 bp, Unknown
  Description of Unknown: RightRegion for integrase B7591 sequence
atcgtggtaaaggacgggcggtacggccacttcgaccttgatgttatttttttgccctaacattgtattagtacatcgtgccgctcggtgccgtccagtctcatgtagaagctgaccgcacaggccgtgccgtcgtcgccctcgtagtcatacatgaacagcgagatgcagtcgttgtacgggtagatattgaagttgtatgcttcgctgtcgtcaatattctgatccagcacccaatcgttaccgtccaggataggctc

SEQ ID NO: 33591 - DNA, 260 bp, Unknown
  Description of Unknown: RightRegion for integrase B7592 sequence
atcgtagtaaaggacgggcggtgcggccacttcgaccttgatgttatttttttgccctaacattgtattagtacatcgtgccgctcggtgccgtccagcctcatgtagaagctgaccgcacaggccgtaccgtccgcgccctcgtagtcatacatgaacagcgagatgctgtcgttatacgggtacaggttgaacttatacgcatcgctctcggttatgttctggtcaagcacccagtcgtagccgtccaggataggctc

SEQ ID NO: 33592 - DNA, 260 bp, Unknown
  Description of Unknown: RightRegion for integrase B7593 sequence
atcgtggtaaaagacgggcggtacggccactacgaccttgatgttacttttttgccctaacattgtattagtgtactgtgccgcccggaaccggaaaatctatgcttgccaagcggctgcctggcattctgccgccactgacctacgaggaggcgctcgagaccagcgccatctactccgtggccgggctgctgcgcggcggcacggggcttatcaagcagcggcccttccgcagcccgcaccacagcgtcagctcgaca

SEQ ID NO: 33593 - DNA, 260 bp, Unknown
  Description of Unknown: RightRegion for integrase B7594 sequence
ttgatcaatcatataatgatcaattcaaatggagattttgagattcattggaccttttaggttatgagtgaatatcgtcgatcgccttaccaatatcatgtctcatgtacttattctcaaaagagatccattccgtcgcctcataagctttctttctggcttccttcagatcttttcctgtggcggtcacgccgaggacacgaccgccgttggtgacgatctggccgttttcgttgaattttgtgccagagtggaagaca

SEQ ID NO: 33594 - DNA, 109 bp, Unknown
  Description of Unknown: RightRegion for integrase B7595 sequence
attgtggtaaaggacgggcggtacggccattttgaccttgacgttatttttttaccctaacattgtattagtacatcgtgccgccgggcaccggcaaaagcatgctggc

SEQ ID NO: 33595 - DNA, 260 bp, Unknown
  Description of Unknown: RightRegion for integrase B7596 sequence
atcgtggtaaaagacgggcggtacggccacttcgaccttgatgttatttttttgccctaacattgtattagtacatcgtgccgctcctgaacggaaactcccggaatgctgaatttgcagagtatgcacagaccaaaggctttacctacaatccggtttatttcgattcgactgagaagatggcagaggcccttcagaacggaacggtcgatgccattgtcaccagttccctgcgcaggataaacaacgagcgcatcctt

SEQ ID NO: 33596 - DNA, 260 bp, Unknown
  Description of Unknown: RightRegion for integrase B7597 sequence
attgtggtaaaagacgggcggtacggccattttgaccttgacgttatttttttaccctaacattgtattagtacatcgtgccgcccggaaccggaaaatctatgcttgccaagcggctgccgggcattctgccgccgctgacctacgaggaggcgctcgagaccagcgccatctactccgtggccgggctgctgcgcggcggcacggggcttatcaagcagcggcccttccgcagcccgcaccacagcgtcagctcgaca

SEQ ID NO: 33597 - DNA, 260 bp, Unknown
  Description of Unknown: RightRegion for integrase B7598 sequence
tctgcaattgacactatatatattgatgataactataatctacgtatagtttttatttaaaattgttattggtatatttttttgttgccagaagataatagaaatgtcatttatggtatagttagagattgctacaaagatcctgtaaaagacgctgttgtaaaacttatagaagttgagtgcaaaatgggaaaagacattagaaaacctgtttctcacacatttactgatgaaaatggagaattcgtatttggaccact

SEQ ID NO: 33598 - DNA, 260 bp, Unknown
  Description of Unknown: RightRegion for integrase B7599 sequence
tctgcaattgacactatatatattgatgataactataatctacgtatagtttttatttaaaattgttattggtatatttttttgttaccagaagataatagaaatgttatttatggtatagttagagattgctacaaagatcctgtaaaagacgctgttgtaaaacttatagaagttgagtgcaaaatgggaaaagacattagaaaacctgtttctcacacatttactgatgaaaatggagaattcgtattcggaccact

SEQ ID NO: 33599 - DNA, 109 bp, Unknown
  Description of Unknown: RightRegion for integrase B7600 sequence
atcgtggtaaaagacgggcggtacggccactacgaccttgatgttatttttttaccctagcattgtattagtgtactgtgccgcccggaaccggaaaatctatgcttgc

SEQ ID NO: 33600 - DNA, 260 bp, Unknown
  Description of Unknown: RightRegion for integrase B7601 sequence
atcgtggtaaaggacgggcgatacggccacttcgaccttgatgttatttttttgccctaacattgtattagtacatcgtgccgctcggtgccgtccagcctcatgtagaagctgaccgcacaggccgtaccgtcgtcgccctcgtagtcatacatgaacagcgagatgctgtcgttatacgggtacaggttgaacttatacgcatcgctctcggttatgttctggtcaagcacccagtcgtagccgtccaggataggctc

SEQ ID NO: 33601 - DNA, 260 bp, Unknown
  Description of Unknown: RightRegion for integrase B7602 sequence
tctgcaattgacactatatatattgatgataactataatctacgtatagtttttatttaaaattgttattggtatatttttttgttgccagaagataatagaaatgttatttatggtatagttagagattgctacaaagatcctgtaaaagacgctgttgtaaaacttatagaagttgagtgcaaaatgggaaaagacattagaaaacctgtctctcacacatttactgatgaaaatggagaattcgtattcggaccact

SEQ ID NO: 33602 - DNA, 260 bp, Unknown
  Description of Unknown: RightRegion for integrase B7603 sequence
gaccatattgaacaagattttgataatattaatgataattggttagttttttttaaataatttcgagtgcataacactaggtgtccttgagttaaaactaaataatctatttttttaatacctactgatttaaagtatggaataagtatattcttagatatatcataattaatatttcctcccgtatcaattaatatatttttattttttaatctaataagagatgagtcaccttgcccaacatctaaaatacttacttc

SEQ ID NO: 33603 - DNA, 260 bp, Unknown
  Description of Unknown: RightRegion for integrase B7604 sequence
attgtggtaaaggacgggcggtacggccattttgaccttgacgttatttttttaccctaacattgtattagtacatcgtgccgcccggatccgggaaaacgacattgggaattgaactgatccgcaggatgaacggaaaagcactgattttggcaccatccattacgatccgggagcagtggatcgcaaggattgaggaagcttttttatgtgagggcatacagggggaagattatctttcacagaatttaaaacagcca

SEQ ID NO: 33604 - DNA, 260 bp, Unknown
  Description of Unknown: RightRegion for integrase B7605 sequence
cacctaaagccggactataccattaactatgttgattttgttcagagtgtctctgtttaaggtgtggatacgttttttcgtatcttacagagaaagtctctgcctaacatgttatccccgtttggcgctgacaaaacaatgaccgccgttctttccaaccaggcagatatcggattcatgggctctgagtcctccatctacacgtataatgagggcgcaaacgattatgtggtgaatttcgcacagcttacccaacgtgc

SEQ ID NO: 33605 - DNA, 260 bp, Unknown
  Description of Unknown: RightRegion for integrase B7606 sequence
atcgtggtaaaggacgggcggtacggccacttcgaccttgatgttatttttttgccctaacattgtattagtacatcgtgccgctcggtgccgtccagcctcatgtagaagctgaccgcacaggccgtaccgtcgtcgccctcgtagtcatacatgaacaacgagatgctgtcgttatacgggtacaggttgaacttatacgcatcgctctcggttatgttctggtcaagcacccagtcgtagccgtccaggataggctc

SEQ ID NO: 33606 - DNA, 260 bp, Unknown; identical to SEQ ID NO: 33601
  Description of Unknown: RightRegion for integrase B7607 sequence

SEQ ID NO: 33607 - DNA, 260 bp, Unknown
  Description of Unknown: RightRegion for integrase B7608 sequence
attgtggtaaaagacgggcggtacggccattttgaccttgacgttatttttttaccctaacattgtattagtacatcgtgccgccgggcacgggcaaaagcatgctggccaagcgcctgccgggcatcctgccgccgctgacctatgaggaagcgctggagaccagcgccatctactcggtggccgggctgctgcctgcgggcagcgggcttttgaaagagcggcccttccgtagcccgcaccacagcgtaagcaccgcc

SEQ ID NO: 33608 - DNA, 260 bp, Unknown
  Description of Unknown: RightRegion for integrase B7609 sequence
tccgtaattgatactatatatattgatgataactataatctacgtatagtttttatttagatttgtgattggtatatttttttgttgccagaagataatagaaatgttatttatggtatagttagagattgttacaaagatcctgtaaaagacgctgttgtaaaacttatagaagttgagtgtaaaatgggaaaagatattagaaaacctgtttctcacacatttactgatgacaatggagaattcgtattcggaccact

SEQ ID NO: 33609 - DNA, 260 bp, Unknown
  Description of Unknown: RightRegion for integrase B7610 sequence
attgtggtaaaggacgggcggtacggccattttgaccttgacgttatttttttaccctaacattgtattagtacatcgtgccgcccggttcgtgtgcttaatacaatgttataaataggtacggaaaagcccaggcgcacagcctgggctttgttgtttcgtccgtgctgtaccgctaaagcggtacaaaaatgcagggcaaagtttgtgcagcttgcctattgaaagtgtaccgctaaagcggtacaatataattaccg

SEQ ID NO: 33610 - DNA, 260 bp, Unknown
  Description of Unknown: RightRegion for integrase B7611 sequence
atcgtggtaaaggacgggcggtacggccacatcgaccttgatgttatttttttgccctaacattgtattagtacatcgtgccgctcggtgccgtccagtctcatgtagaagctgaccgcacaggccgtgccgtcgtcgccctcgtagtcatacatgaacagcgagatgcagtcgttgtacgggtagatattgaagttgtatgcctcgctgtcgtcaatatgctgatccagcacccaatcgctgccgtccagaatcggctc

SEQ ID NO: 33611 - DNA, 136 bp, Unknown
  Description of Unknown: RightRegion for integrase B7612 sequence
attgtggtaaaagacgggcggtacggccattttgacctcgacgttatttttttaccctaacattgtattagtacatcgtgccgccggttccatcaaactgcagggcagcgtgaccgccgttaccaccatccccagc

SEQ ID NO: 33612 - DNA, 260 bp, Unknown
  Description of Unknown: RightRegion for integrase B7613 sequence
cacctaaagtcggactataccattaactatattgattttgttcagagtgtctctgtttaaggtgtggatacgtttttccgtatcttacagagaaagtctctgcctaacatgttatccccgtttggcgctgacaaaacaatgaccgccgttctttccaaccaggcagatatcggattcatgggctctgagtcctccatctacacgtataatgagggcgcaaacgattatgtggtgaatttcgcacagcttacccaacgtgc

SEQ ID NO: 33613 - DNA, 183 bp, Unknown
  Description of Unknown: RightRegion for integrase B7614 sequence
attgtggtaaaggacgggcggtacggccattttgaccttgacgttatttttttaccctaacattgtattagtacatcgtgccgcccggaaccggaaaatctatgcttgccaagcggctgccgggcattttgccgccgctgacctatgaggaggcgctcgagaccagcgccatctactccgtgg

SEQ ID NO: 33614 - DNA, 260 bp, Unknown
  Description of Unknown: RightRegion for integrase B7615 sequence
acatttatccataaaattcttatatatagggataggtgggaggttgttttctatatatagcggttttatatacacccaaaattgataggtgcatgaccgccgatgttatttgtctgttgtttgccgtttgacacagaatcatctcctttcataaatatttattatagcataagggagtaaatttagcaaaacggtttttgttatagtctgctgcgcaatcgaaatttgtatcataggaggtaaaaaacatgaagaaaatc

SEQ ID NO: 33615 - DNA, 260 bp, Unknown
  Description of Unknown: RightRegion for integrase B7616 sequence
agcctcatatcccgaattgtcctgaccgacgaccaagttgatattgagtgggcgttttagcgcaaaagaaaaagccctcccgcgcaggaataatcctgcacgggagggctttttggctcacttagtttcggtgctcagctgagataccgcgatggtagcggcggtggcagccgcagtgctggcagccacttcggtggctccgctggtggaagacgggagcgcaatcttctgacggcgcacctcggcttcaattttagtcg

SEQ ID NO: 33616 - DNA, 260 bp, Unknown
  Description of Unknown: RightRegion for integrase B7617 sequence
agcctcatatcccgcattgtcctgaccgacgaccaagttgatattgagtgggcgttttagcacaaaagaaaaagccctcctgcacaggaacaatcctgcacgggagggcttttggcttacttggtttcggcgttcagctgagatactgcgatagtggcggcggtggcagccgcagtgctggcagccacttcggtggcgccgctggtagcggacgggagcgcaatcttctgacggcgcacctcggcttcaattttagttgt

SEQ ID NO: 33617 - DNA, 260 bp, Unknown
  Description of Unknown: RightRegion for integrase B7618 sequence
caattgatcaaatacatatctgtaaacgctgattctatcagcatacactggaggttttaattttttttatatttttatctaacttttatcattcatttcaccgatcagttgttctaatttcataaacaccccttataaatattttaccttttacaagtgcccaacactacttctaattattttatcatagggctatttacaagtaaactttaccattctatcgttcctttaatatgtgcgataaaatatattcaaaaagg

SEQ ID NO: 33618 - DNA, 109 bp, Unknown
  Description of Unknown: RightRegion for integrase B7619 sequence
acatttatccataaaattcttatatatagggataggtgggaggttgttttctatatatagcggttttatatacacccaaaattgataggtgcatgaccgccgatgttag

SEQ ID NO: 33619 - DNA, 260 bp, Unknown
  Description of Unknown: RightRegion for integrase B7620 sequence
agcctcatatcccgcattgtcctgaccgacgaccaagttgatattgagtgggcgttttagcgcaaaaaaagaaaaagccctcccatgcaggaacaatcctgcatgggagggctcttggcttactttgtttcggcgttcagctgagataccgcgattgtggcagcagtggcagccgcagtgctggcagccacttcggtggcgccgccggtagaggacgggagcgcaatcttctgacggcgcacctcggcttcaattttagt

SEQ ID NO: 33620 - DNA, 109 bp, Unknown
  Description of Unknown: RightRegion for integrase B7621 sequence
acatttatccataaaattctcatatatagggataaatgggaggttgttttctatatatagtggttttatatacacccaaaattgataggtgcatgaccgccgatattgg

SEQ ID NO: 33621 - DNA, 260 bp, Unknown
  Description of Unknown: RightRegion for integrase B7622 sequence
acatttatccataaaattctcatatatagggataaatgggaggttgttttctatatctagtggtttttatatacacctaaaacagataggtggatgaccgccgatgttatttgtctgttgtttgccatttgacacagaatcatctcctttaataaataattcattataccatacgggagtaaatttagcaaaacggtttttgttatagtctgctgcgcaatcgaaatttgtatcataggaggtaaaaaacatgaagaaaa

SEQ ID NO: 33622 - DNA, 260 bp, Unknown
  Description of Unknown: RightRegion for integrase B7623 sequence
agcctcgtgaaccgcatcatcgtgacagatgacaaggtggacatcgaatggtctttttgagcatacaaaaagagcctcggccaatgaaggtcgaggctctttcattcggcgtgctgggattcacgcctctgccgtctgagcgacagtcttgccgagagctgtcttcgtgatgtacacgagcccttcgagcacaagcggcaggacgatgccgtcgcggattttgcaccagcccgtctcggttttcgcctgctctttcgtag

SEQ ID NO: 33623 - DNA, 260 bp, Unknown
  Description of Unknown: RightRegion for integrase B7624 sequence
caactgataaaatacatatctgtaaacgctgattatatcagcattcactggcggttttaattttttttcatattttatctaacttttatcattcatttcaccgatcagttgttctaatttcataaacaccccttataaatattttaccttttacaagtgcccaacactacttctaattattttatcatagggctatttacaagtaaactttaccattctatcgttcctttaatatgtgcgataaaatatattcaaaaagg

SEQ ID NO: 33624 - DNA, 260 bp, Unknown
  Description of Unknown: RightRegion for integrase B7625 sequence
gatgttgaagcatatcgtgtaggaaaagaagattttataaaaatagaattagtaaaataagtatatacacaactatactttaccatttccacagcaggtataaagcattacaggtcttgtattacatactatacaattagttcctcctccaagcactggtctatcgcaagtttgtaaacagttatctggacatgcattttcttgtaatactaaaatgacacatagtatttcattaatgcaatttccgttgctgtttgaat

SEQ ID NO: 33625 - DNA, 260 bp, Unknown
  Description of Unknown: RightRegion for integrase B7626 sequence
agcctcgtatctcgcatcgtcctcaccgacgaccaagttgatattgagtgggcattttagcgcaaaagaaaaaagccctcccgcgcaggataattcctacgtgggagggcttttaagttacttcttttcagtgccgagctgggaaacggtgatgcttgcggcggtagccgcggcagtgctggttgccacctccgtggcgccgtttgcggtagcaggcagggtaatcttctgcttacgcacctctgcctcaattttggttg

SEQ ID NO: 33626 - DNA, 260 bp, Unknown; identical to SEQ ID NO: 33616
  Description of Unknown: RightRegion for integrase B7627 sequence

SEQ ID NO: 33627 - DNA, 260 bp, Unknown
  Description of Unknown: RightRegion for integrase B7628 sequence
agcctcatatcccgcattgtcctgaccgacgaccaagttgatattgagtgggcgttttagcgcaaaagaaaaagccctcccgcacaggaacaatcctgcacgggagggcttttggcttatttagtttcggcgctcagctgagataccgcgatggtagcggcggtggcagccgcagtgctggcagccacttcggtggctccgctggtggaagacgggagcgcaatcttctgacggcgcacctcggcttcaattttagtcgt

SEQ ID NO: 33628 - DNA, 260 bp, Unknown
  Description of Unknown: RightRegion for integrase B7629 sequence
caactgataaaatacatatctgtaaacgctgattctatcagcattcactggcggttttaattttttttcatattttatctaacttttattattcatttcagcaaatagtaaaagttagataaaaaagaaggggcagctttttggctgtccctaacttttaaaattcatcgatcatcgggcaatcgtgatgatccatcttctttagatcatctatgctcacatagtactttatgagcgcgtatgcaatgtctctttttccc

SEQ ID NO: 33629 - DNA, 260 bp, Unknown
  Description of Unknown: RightRegion for integrase B7630 sequence
gtcattaaagaaataagaattgataatgaccagaatatcacgggtgttgtttttgggtagtgttgtactaattgaacactacccgtcggttcatctgccagtaaaatagcaggttttgccgctaatgctcttgcgattgccaccctttgctgctgaccccctgacagtgcacttggaagattttccagttttgtccgaatacccagtgtatctatgatttcatttacataacctttttcaatcttttttccatccagttt

SEQ ID NO: 33630 - DNA, 260 bp, Unknown
  Description of Unknown: RightRegion for integrase B7631 sequence
gcagctatgaaagatgaaatttttgtgaaaaaaatagttactatgtccaacaagctgtagacttgctcgttgaccatgtaaccatcaccgataaagtgctgaaaatcaccttatcaacgcaaaatgtttgcgcttatttggtgccgcggaccggaatcgaaccggtacgggtatcactacccgagggattttaagtcccttgcgtctgccagttccgccaccgcggcagacataactacttaacaccttttaagaaataa

SEQ ID NO: 33631 - DNA, 260 bp, Unknown
  Description of Unknown: RightRegion for integrase B7632 sequence
agcctcatatcccgcattgtcctgaccgacgaccaagttgatattgagtgggcgttttagcgcaaaagaaaaagccctcccgcgcaggattattcctgtgcgggagggcttttggcttatttagtttcggcgctcagctgagataccgcgatggtagcggcggtggcagccgcagtgctggcagccacttcggtggctccgcttgtggaagacgggagcgcaatcttctggcggcgcacctcggcttcaattttagtcgt

SEQ ID NO: 33632 - DNA, 148 bp, Unknown
  Description of Unknown: RightRegion for integrase B7633 sequence
atcatagaggagatctatatagacgggactgaggtaaccgggattaagccccggatttaatcttacccgtatggtggactaagttgcacactctgtactcacccccgcgccgccgaaaaagacgatgcggttactctcctgcacccat

SEQ ID NO: 33633 - DNA, 138 bp, Unknown
  Description of Unknown: RightRegion for integrase B7634 sequence
cagctgatcaaatatatatctgtaaacgctgattctatcagcatacactggaggttttaattttttttcttcctcaggcatggaaaactccttgtaccgcggcgagcatattctggtaaataaatggagctatgggtt

SEQ ID NO: 33634 - DNA, 260 bp, Unknown
  Description of Unknown: RightRegion for integrase B7635 sequence
gctgttaaagaggtcgttttgaatactgctaaacgtcgatgtaacttttcacaacggtaaggtaattgacctaccaataacagaagacccctcggaggatgttacagaggctatacagtcgctttctgaagtcactgagaggggtttaatagatgttgatgaggttatcatatagttgagattctatcgtcagtagcgcttgttaggattcacagaaaacttccgtaaagcattacccgacttaagcacctttgaagctt

SEQ ID NO: 33635 - DNA, 260 bp, Unknown
  Description of Unknown: RightRegion for integrase B7636 sequence
caactgataaaatacatatctgtaaacgctgattctatcagcattcactggcggttttaattttttttcatattttatctaacttttatcattcatttcagcaaatagtaaaagttagataaaaaagaaggggcagcttttcggctgtccctaacttttaaaattcatcgatcatcgggcaatcgtgatgatccatctcttttagatcatctatgctcacatagtactttatgagcgcgtatgcaatgtctctttttcct

SEQ ID NO: 33636 - DNA, 260 bp, Unknown
  Description of Unknown: RightRegion for integrase B7637 sequence
aaatatatagaatatattatatataacgaagatggaacttacgaaataaagttcaaataattattattatagcactaacaatatgaaccattttctgctttggactatgttacgagacttgccctttctgatgatttatataaaattattaaaaatgagggtaaaactgctattttagtaacacatgatttagcagaagctatttctttatctgatagagtagttgtgttaacaaaaagaccggccacagttaaaaagat

SEQ ID NO: 33637 - DNA, 109 bp, Unknown
  Description of Unknown: RightRegion for integrase B7638 sequence
acatttatccataaaattctcatatatagggataaatgggaggttgttttctatatctagtggtttttatatacacctaaaacagataggtggatgaccgccgatattg

SEQ ID NO: 33638 - DNA, 260 bp, Unknown
  Description of Unknown: RightRegion for integrase B7639 sequence
atcatagaggagatctatatagacgggactgaggtaaccgggattaagccccggatttaatcttacccgtatggtggactaagttgcacactctgtactcactcccgcgccgccgaaaaagacgatgcggttactctcctgcacccatgttttcagagtttccagcttgttcacggtcttccgcctccatttccttcagcagcttcttgtcctgcttcgacgataaatccagctgtgcatacatgtccggccgccgcgcc

SEQ ID NO: 33639 - DNA, 260 bp, Unknown
  Description of Unknown: RightRegion for integrase B7640 sequence
agcctcatatcccgcattgtcctgaccgacgaccaagttgatattgagtgggcgttttagcgcaaaaaagaaaaagccctcccatgcaggaacaatcctgcatgggagggctcttggcttactttgtttcggcgttcagctgagataccgcgatggtggcagcagtggcgccgccggtagaggacgggagcgcaatcttctgacggcgcacctcggcttcaattttagtcgtcaggtactcggtgaggtcgccatacagg

SEQ ID NO: 33640 - DNA, 260 bp, Unknown
  Description of Unknown: RightRegion for integrase B7641 sequence
agcctcgtatcccgcatagtcctcaccgacgaccaagttgatattgagtgggcattttagcgcaaaagaaaaaagccctcccgcgcaggataattcctgaactgccccagcttgtgcagacagcacaaaaaagccccgggtgtaggaatattcagttttaacaggagtagcgcagcgttagcggcgccactcctgttttgctttggatacgctcatagttgtaaaaatggatatagcgatcaatcatttcatttgcctcg

SEQ ID NO: 33641 - DNA, 260 bp, Unknown
  Description of Unknown: RightRegion for integrase B7642 sequence
atcatagaggagatctatatagacgggactgaggtaaccgggattaagccccggatttaatcttacccgtatggtggactaagttgcacactctgtactcactcccgcgccgccgaaaaagacgatgcggttactctcctgcacccatgttttcagagtttccagcttgttcacggtcttccgcctccatttccttcagcagcttcttatcctgcttcgacgataaatccagctgttcgtacatatccggccgccgggca

SEQ ID NO: 33642 - DNA, 260 bp, Unknown
  Description of Unknown: RightRegion for integrase B7643 sequence
gatatagcgtgcgtggctccaccacaagtcaaaaaatccgaacattatcatcaatggtgatacgttcggatttttgatttttatgagtttttataatttagaaattactatggtttgtagcatattctcggcctcctccaagccttgcatcacttccgccatgatgcgagtggccaagataaatcctgaactgaacgcttcacactcagtgatgcagaacagttcacttgtgcagtccttgaatttttcaaaggtttctt

SEQ ID NO: 33643 - DNA, 141 bp, Unknown
  Description of Unknown: RightRegion for integrase B7644 sequence
agcctcatatcccgcattgtcctgaccgacgaccaagttgatattgagtgggcgttttagcgcaaaagaaaaagccctcccacgcaggattattcctgtctcttatacacatctccgagcccacgagaccgaggctgatct

SEQ ID NO: 33644 - DNA, 260 bp, Unknown
  Description of Unknown: RightRegion for integrase B7645 sequence
agccttgtgtcccgcattgtgctcaccgacgatgacgtcaagattgagtgggccttctgacagcaacgaaaaaagccctaccgctgcgtgagcggtagggctttcctgttacttctctgaagactgcgcgattgcgttctgcacaacggcggctgcggtcgcagcagcagtgctggcggcaaccgatgtagcattcgcagagctggcgctttccagtgccgcagcagcaggcagcgccttctgcttgcgtacctcggcct

SEQ ID NO: 33645 - DNA, 260 bp, Unknown
  Description of Unknown: RightRegion for integrase B7646 sequence
agcctcgtgtcccgtatcgtcctcaccgacgatgacgtcaagattgagtgggccttctgatggcaataaaaaaaaagccctgccgctgcgtgagcggtagggctttcctgttacttctccgaagtctgcgtaatcgcgttctgcacgacggctgcggcagtcgcagcagcggtgctggcggccaccgtggtggagctggcgctttccagagcagcggcagcagtcgaggtgctgagtttctgccggcgtaccgcagcctc

SEQ ID NO: 33646 - DNA, 260 bp, Unknown
  Description of Unknown: RightRegion for integrase B7647 sequence
agcctcgtgtcccgcattgtgctcaccgacgatgccgtcaagattgagtgggccttctgatggcaaacaaaaaaagccctaccgctgcgtgagcggtagggctttcctgttacttctctgaagactgcgcgattgcattctgtacaacagcagctgcggtcgcagcggcagtgctggcagcaaccgatgttgcattcgcagagctggcgctttccagtgccgcagtagcggcgggcagcgccttctgcttgcgtacctcg

SEQ ID NO: 33647 - DNA, 109 bp, Unknown
  Description of Unknown: RightRegion for integrase B7648 sequence
attgaaaagattgaggttatcgataatgaaataactatatatttttatgtgtccatttaagcaatcacttgcatatttgctgggtgccgtagaatccaagcagatgcga

SEQ ID NO: 33648 - DNA, 260 bp, Unknown
  Description of Unknown: RightRegion for integrase B7649 sequence
agcctcgtgtcccgcattgtgctcaccgatgatgacgtcaagattgagtgggccttctgatggcaaacaaaaaaaaagccctaccgctgcgtgagcggtagggctttcctgttacttctctgaagactgcgcgattgcattctgtacaacagcagctgcggtcgcagcggcagtgctggcagcaaccgatgttgcattcgcagagctggcgctttccagtgccgcagtagcggcgggcagcgccttctgcttgcgtacct

SEQ ID NO: 33649 - DNA, 260 bp, Unknown
  Description of Unknown: RightRegion for integrase B7650 sequence
agccttgtgtcccgcattgtgctcaccgacgatgacgtcaagattgagtgggccttctgacagcaacgaaaaaagccctaccgctgcgtgagcggtagggctttcctgttacttctctgaagactgcgcgattgcgttctgcacaacggcggctgcggtcgcagcagcagtgctggcggcaaccgatgtagcattcgcagagctggcgctttccagtgccgcagtagcggcgggcagcgccttctgcttgcgtacctcgg

SEQ ID NO: 33650 - DNA, 260 bp, Unknown; identical to SEQ ID NO: 33644
  Description of Unknown: RightRegion for integrase B7651 sequence

SEQ ID NO: 33651 - DNA, 260 bp, Unknown; identical to SEQ ID NO: 33649
  Description of Unknown: RightRegion for integrase B7652 sequence

SEQ ID NO: 33652 - DNA, 260 bp, Unknown
  Description of Unknown: RightRegion for integrase B7653 sequence
agtctcatatctcgtatcgtcctcaccgacgatgacgtcgagattgagtgggcgttctgatggcaaacaaaaaaaagccctaccgctgcgtgagcggtagggctttcctgttacttctctgaagactgcgcgattgcattctgtacaacagcagctgcggtcgcagcggcagtgctggcagcaaccgatgttgcattcgcagagctggcgctttcgagtgccgcagtagcggcgggcagcgccttctgcttgcgtaccgc

SEQ ID NO: 33653 - DNA, 260 bp, Unknown
  Description of Unknown: RightRegion for integrase B7654 sequence
ggtttaataaatagaatatatttagacgggaataagatatctcatgttgattttaattgaataaagtatggctttcgatggtgtcatttgtagatgcgggtcgtaaagccatacttttttaatgttcattttgtatacataatcgtatataatacctaaaaggagatgaacaatatgacaaataaagattcaataaataaaatattatctagattagaaagcgtaaggaatgaaatagagtcaattaggcgcgacttaaa

SEQ ID NO: 33654 - DNA, 260 bp, Unknown
  Description of Unknown: RightRegion for integrase B7655 sequence
agccttgtgtcccgcattgtgctcaccgacgatgacgtccagattgagtgggccttctgacagcaacgaaaaaagccctaccgctcacgtgagcggtagggctttcctgttacttttctgaagactgcgcgattgcgttctgcacaacggcggctgcggtcgcagcagcagtgctggcggcaaccgatgtagcattcgcagagctggcgctttccagtgccgcagtagcggcgggcagcaccttctgcttgcgtacctcg

SEQ ID NO: 33655 - DNA, 260 bp, Unknown
  Description of Unknown: RightRegion for integrase B7656 sequence
gggttaataaacagaatatatttagacgggaataagatatcttatgttgattttaattgaataaagtatggctttcgatggtgtcatttgtagatgcaggtcgtaaagccatacttttttaatgttcattttgtatacataatcgtatataatacttaaaaggagatgagtaatatgacaaataaagattcaataaataaaatattatctagattagaaagcgtaaggaatgaaatagagtcaattaggcgcgacttaaa

SEQ ID NO: 33656 - DNA, 260 bp, Unknown
  Description of Unknown: RightRegion for integrase B7657 sequence
agcctcgtttcccgcataattcttaccgatgatgacgtaaaaatcgagtgggccttctgatggcaataaaaaaagccctgccgctgcatgagcggtagggctttcctgttacttctccgaagttttcgcaatcgcgttctgcacgacggccgcggcagtcgcagcggcggtgctggcggcgacggtggtggtctctgctgcgtcctccttcgaggccgtagtggacgcgggcagggccttcttctgcttgcgtacctcgg

SEQ ID NO: 33657 - DNA, 260 bp, Unknown
  Description of Unknown: RightRegion for integrase B7658 sequence
ggtttaataaatagaatatatttagacgggaataagatatctcatgttgattttaattgaataaagtatggctttcgatggtgtcatttgtagatgcgggtcgtaaagccatacttttttaatgttcattttgtatacataatcgtatataatacttaaaaggagatgagtaatatgacaaataaagattcaataaataaaatattatatagattagaaagcgtaaggaatgaaatagagtcaattaggcgcgacttaaa

SEQ ID NO: 33658 - DNA, 260 bp, Unknown
  Description of Unknown: RightRegion for integrase B7659 sequence
agccttgtgtcccgcattgtgctcaccgacgacgacgtcaagattgagtgggccttctgacggcaaacaaaaaaaaagccctaccgctgcgtgagcggtagggctttcctgttacttctctgaagactgcgcgattgcgttctgcacaacggcggctgcggtcgcagcagcagtgctggcggcaaccgatgtagcattcgcagagctggcgctttccagtgccgcagtagcggcgggcagcaccttctgcttgcgtacct

SEQ ID NO: 33659 - DNA, 260 bp, Unknown
  Description of Unknown: RightRegion for integrase B7660 sequence
attgaccgcatagaggtggatgaggaaaatgtgtatttctcctggtcatttgcggactgataggggaatgtttgttcctctttgagtatataccactatcaagatatctgtctttacacaaaatttaatcgtttagtatttttcttacaaataaaaagggctggaattttagttcctgcccttttctgcccttttgatttcctcatgctttttcatgacaaaatccttgaatgcctgatttgcatagcgtttcttgtctc

SEQ ID NO: 33660 - DNA, 260 bp, Unknown
  Description of Unknown: RightRegion for integrase B7661 sequence
agccttgtgtcccgcattgtgctcaccgacgatgacgtcaagattgagtgggccttctgacggcaaacaaaaaaaaagccctaccgctgcgtgagcggtagggctttcctgttacttctctgaagactgcgcgattgcattctgtacaacagcagctgcggtcgcagcggcagtgctggcagcaaccgatgttgcatttgcagagctggcgctttccagtgccgcagtagcggcgggcagcgccttctgcttgcgtacct

SEQ ID NO: 33661 - DNA, 260 bp, Unknown
  Description of Unknown: RightRegion for integrase B7662 sequence
aattacattgattatataatacaagatgatgtaaatgagttcaaaattatttttaaataggaaattcgtgtgaatactaattatacagctccgtttggaccaataaagccaaaaacctcgcctttttctaacgatagtgaaaggttttctacacctaaaactttatcataatactttgttaaattttttatttctaatacttttttcataaagactccttattttctagttcatagatattatatcatggatttgatatt

SEQ ID NO: 33662 - DNA, 260 bp, Unknown
  Description of Unknown: RightRegion for integrase B7663 sequence
agcctcatctcccgcatcgtcctcaccgacgatgacgtcaagattgagtgggccttctgacagcaacgaaaaaagccctaccgctgcgtgagcggtagggctttcttgttacttctctgaagactgcgcgattgcgttctgcacaacggcggctgcggtcgcagcagcagtgctggcggcaaccgatgtagcattcgcagagctggcgctttccagtgccgcagtagcggcgggcagcaccttctgcttgcgtacctcgg

SEQ ID NO: 33663 - DNA, 260 bp, Unknown
  Description of Unknown: RightRegion for integrase B7664 sequence
agccttgtgtcccgcattgtgctcaccgacgatgacgtcaagattgagtgggccttctgacagcaacgaaaaaagccctaccgctgcgtgagcggtagggctttcctgttacttctctgaagacttcgcgattgcgttctgcacaacggcggctgcggtcgcagcagcagtgctggcggcaaccgatgtagcattcgcagagctggcgctttccagtgccgcagtagcggcgggcagcgccttctgcttgcgtacctcgg

SEQ ID NO: 33664 - DNA, 260 bp, Unknown
  Description of Unknown: RightRegion for integrase B7665 sequence
agcctcgtgtcccgcattgtgctcaccgacgatgacgtcaagattgagtgggccttctgatggcaaacaaaaaaagccctaccgctgcgtgagcggtagggctttcctgttacttctctgaagtctgcgtaatcgcgttctgcacaacggctgcggcagtcgcagcggcggtgctggcggcaaccgttgtggagctggcgctttccagagcagcggcagcagtcgaggtgctgagtttctgccggcgtaccgcagcctca

SEQ ID NO: 33665 - DNA, 260 bp, Unknown
  Description of Unknown: RightRegion for integrase B7666 sequence
agccttgtgtcccgcattgtgctcaccgacgatgacgtccagattgagtgggccttctgacagcaacgaaaaaagccctaccgctcacgtgagcggtagggctttcctgttacttttctgaagactgcgcgattgcgttctgcacaacggcggcttcggtcgcagcagcagtgctggcggcaatcgatgtagcattcgcagagctggcgctttccagtgccgcagtagcggcgggcagcaccttctgcttgcgtacctcg

SEQ ID NO: 33666 - DNA, 260 bp, Unknown; identical to SEQ ID NO: 33644
  Description of Unknown: RightRegion for integrase B7667 sequence

SEQ ID NO: 33667 - DNA, 260 bp, Unknown
  Description of Unknown: RightRegion for integrase B7668 sequence
agcctcatctcccgcattgtgctcaccgacgatgacgtcaagattgagtgggccttctgataacaacaaaaaaaagccctaccgctgcgtgagcggtagggctttcttgcttatgcgggagctgcctcggaactgattttctggacggcgttctgcacgacggcagcggcagtcgcagcggcctggcggcgcgtgaagacatagccgaagagcttcatcacccacaccagcagaaccagcacgaggaacacgaggcagat

SEQ ID NO: 33668 - DNA, 260 bp, Unknown; identical to SEQ ID NO: 33649
  Description of Unknown: RightRegion for integrase B7669 sequence

SEQ ID NO: 33669 - DNA, 260 bp, Unknown
  Description of Unknown: RightRegion for integrase B7670 sequence
agcctcgtgtcccgcattgtgctcaccgacgatgacgtcaagattgagtgggccttctgacagcaacgaaaaaagccctaccgctgcgtgagcggtagggctttcctgttacttctctgaagactgcgcgattgcgttctgcacaacggcggctgcggtcgcagcagcagtgctggcggcaaccgatgtagcattcgcagagctggcgctttccagtgccgcagtagcggcgggcagcgccttctgcttgcgtacctcgg

SEQ ID NO: 33670 - DNA, 260 bp, Unknown
  Description of Unknown: RightRegion for integrase B7671 sequence
agtttaatacaagctgtcaacgtggacggtcagcaagtatcggttgtttggaggatttgattttacaaaattatacgcactatgcacatagtatatataattttgtatttacaaataaaaaattggggagtggttgcaattgccactcccaataaattaatattctgcaaaagcgtcttgtatcgcttcgtatatgtgaacaggatcgagtttaaattttgtaaatctgtcaactatactttttacaaaatagtaatctg

SEQ ID NO: 33671 - DNA, 260 bp, Unknown
  Description of Unknown: RightRegion for integrase B7672 sequence
agtctcgtgtcccgcattgtgctcaccgacgatgacgtcaagattgagtgggccttctgatggtaaacaaaaaaaaagccctaccgctgcgtgagcggtagggctttcctgttacttctctgaagactgcgcgattgcattctgtacaacagcagctgcggtcgcagcggcagtgctggcagcaaccgatgttgcattcgcagagttggcgctttccagtgccgcagtggcggcgggcagcgccttctgtttgcgtacct

SEQ ID NO: 33672 - DNA, 260 bp, Unknown
  Description of Unknown: RightRegion for integrase B7673 sequence
ctgattgacaaaatattgatagacgacgatgcaatcaatatcattttgcgaaaaatatgatttacaagtttacaaagcccatgcacatggtcagtgcctgttttccgcaggcggcacaccgtttgaagcaccggtccaggttaaatgcaactcttggaaggtaaccgaagtcttccagcagcgtaaacaacgggaaaaagattgccattggaggcagcataaccgatattacccatgccagaacccggtaaacgccatga

SEQ ID NO: 33673 - DNA, 70 bp, Unknown
  Description of Unknown: RightRegion for integrase B7674 sequence
gtcattaaagaaattagaattgataatgaccagaatatcacgggtgttgtttttgggtagtgttgtacta

SEQ ID NO: 33674 - DNA, 90 bp, Unknown
  Description of Unknown: RightRegion for integrase B7675 sequence
ctgattgacaaaatattaatagacgacgatgcaatcaatatcattttgcgaaaaatatgatttacaagtttacaaagcccatgcacatgg

SEQ ID NO: 33675 - DNA, 260 bp, Unknown
  Description of Unknown: RightRegion for integrase B7676 sequence
gtcattaaagaaattagaattgataatgaccagaatatcacgggtgttgtttttgggtagtgttgtactaatgtgacactacccgtcggttcatcagctaaaatcagtttcggttcattgattaaggctctagcacaagcacaacgctgtttttgtccgccagaaacttcataaggaaatttcgataaaatatcacgaatacccaatttatcggcgatagcatgaactcttttctcaatatcagtagggttctgtttgtt

SEQ ID NO: 33676 - DNA, 260 bp, Unknown
  Description of Unknown: RightRegion for integrase B7677 sequence
gtttcaaaaatcataataaacgggccggacaaatctataacaccctgcttttattattgatcgccgtcttgatgttgttcattccagttgtgccagacgttctggacgtcgtcgttatcctcgagcatttccagcagcttctccattttcgccacctggtcgggatcgtcgatcgcagtataaacatccggcacctgctcgatttccgccgaaacgaacgaatagcccttggcctccagatcatcgcgcacgccggaaaa

SEQ ID NO: 33677 - DNA, 260 bp, Unknown
  Description of Unknown: RightRegion for integrase B7678 sequence
gtcattaaagaaattagaattgataatgaccagaatatcacgggtgttgtttttgggtagtgttgtactaacgtgacactacccgtgggctgtgttaagttagtacaaaataaagaaccccagcaaggctgctgcctgccggggttcttcttttctaaaactcttcttcgtagccagttgttttccactgtaaaacttcgccgtcgtcgtccacttcgtctggctcctgcactggtctgtatgttctttcttttccctct

SEQ ID NO: 33678 - DNA, 88 bp, Unknown
  Description of Unknown: RightRegion for integrase B7679 sequence
gtcattaaagaaataagaattgacaatgaccagaatatcacgggtgttgtttttgggtagtgttgtactaatttaacactacccgtcg

SEQ ID NO: 33679 - DNA, 260 bp, Unknown
  Description of Unknown: RightRegion for integrase B7680 sequence
gtcattaaagaaattagaattgataatgaccagaatatcacgggtgttgtttttgggtagtgttgtactaatgtgacactacccgtcggctcatctgcaaatacaatacttggattcagcacgagagctctcgccatacccacacgctgctgctgcccaccggacatctgatttggcttatgtaagcggtatttcttcagaccaaccagatcgatcatcttctgtgcccgcttcatacggacatttttggagatgccccg

SEQ ID NO: 33680 - DNA, 110 bp, Unknown
  Description of Unknown: RightRegion for integrase B7681 sequence
acaatacaggagatttacctaaatgatgacaatacgattaaagctgtagattttttataatctgttttgtactaagtgtttagccccatttggagccgacaaaacgatga

SEQ ID NO: 33681 - DNA, 145 bp, Unknown
  Description of Unknown: RightRegion for integrase B7682 sequence
gtcattaaagaaattagaattgataatgaccagaatatcacgggtgttgtttttgggtagtgttgtactaatgtgacactacccgtaggctcatctgccaggatcagggacggatccccggccagcgctcttgcaatagatacac

SEQ ID NO: 33682 - DNA, 260 bp, Unknown
  Description of Unknown: RightRegion for integrase B7683 sequence
gtcattaaagaaattagaattgataataaccagaatatcacgggtgttgtttttgggtagtgttgtactaacgtgacactacccgtgggttcatccgccataataatctccggattctttaccaacgctctcgcaatcgcaacacgctgtttctgtccgccggataattcattcggctttctgctgccataaccctctaaatctacttccctcaatatctcgttgatttcttcgtctgtcgcttttttcccctgaagctc

SEQ ID NO: 33683 - DNA, 109 bp, Unknown
  Description of Unknown: RightRegion for integrase B7684 sequence
ttgctgatcagtgagatcgaagttgctaacgattctatcaagattcactggcgtttttaaataattttagaaactttgatttcaactaacgtaaaagcggatttatttt

SEQ ID NO: 33684 - DNA, 260 bp, Unknown
  Description of Unknown: RightRegion for integrase B7685 sequence
gtcattaaagaaataagaattgacaatgaccagaatatcacgggtgttgtttttgggtagtgttgtactaattgaacactacccgtcggttcgtcagccaagatgatagccggttttgtaatcaaagctctggcaattgcaaccctctgttgttgcccacctgatagatttccaggaagattctccaattttttatcaatgcccaaaattgttacaattttgttcaaaaaatctttatctatatcatttccgtctaattc

SEQ ID NO: 33685 - DNA, 260 bp, Unknown
  Description of Unknown: RightRegion for integrase B7686 sequence
tcaatcgaagttacatggacaacggaaattaagagaattgacaaggttaattttttttagccttgttatactactaacataatatatccattcggtgacagttagttaatagtataacatcaataataattaaggcttgtaaaaaattagattataggatataatgtgattgatgtttataatagaacatcaattactgtccttgtaagtgtcacctttgggtggcacttattttttttgaaaaagtttaaaaaaaggac

SEQ ID NO: 33686 - DNA, 85 bp, Unknown
  Description of Unknown: RightRegion for integrase B7687 sequence
ttactgatcagtgagattgaagttgctaacgattccatcaagatccactggcgtttttaaataattttagaaactttcatctcaa

SEQ ID NO: 33687 - DNA, 260 bp, Unknown
  Description of Unknown: RightRegion for integrase B7688 sequence
gccattaaagaaattagaattgataatgaccagaatatcacgggtgttgtttttgggtagtgttgtactaatgtgacactacccgtcggttcatcagcaagtattatctgcggattagttataagtgcccttgctactgctgctctttgcttctgtccaccagatacctcatatggatatttatccagaagctgttctataccaagtcttttagaaagcggctttaccctttcttccatctcgttatatttttttcctga

SEQ ID NO: 33688 - DNA, 260 bp, Unknown
  Description of Unknown: RightRegion for integrase B7689 sequence
ataataaaacagatacaccttaatgatgattgcacaataaaagaggtagattttttgtaaattattttgtactaattatattgccccatttggcgccgataaaacaatgaccgccgttctctccggtgaggcagatatcggctttatgggatcagaagcttccatctacacttacaacgaaggggcaaatgattatgtcgtcaactttgcacagctgacacagcgcgcaggcaacttccttgtcgcacgggaagaaatgc

SEQ ID NO: 33689 - DNA, 260 bp, Unknown
  Description of Unknown: RightRegion for integrase B7690 sequence
gtcattaaagaaattagaattgataatgaccagaatatcacgggtgttgtttttgggtagtgttgtactaattgaacactacccgtcggctcatcagcgaatataactgacggatgtgtaatcagtgcccttgcgattgcaactctctgctgttcaccacctgacatctgtgcaggaaatttatccttacagtaatctatgccaagtgattccattaattcagtgactttctcctcatcagcttgctcactgtcaagaat

SEQ ID NO: 33690 - DNA, 260 bp, Unknown
  Description of Unknown: RightRegion for integrase B7691 sequence
gtcattaaagaaattagaattgataatgaccagaatatcacgggtgttgtttttgggtagtgttgtactaatgtgacactacccgtaggttcatctgctaataagagtttaggatgattgattaatgctctgccaatggctattttttgctgttgaccaccagaaagctgacccggataaaaatttgccttgttttccatccccaaaatcgtcagtattttcttaacttctctttgatctacgcttttaccatccatcag

SEQ ID NO: 33691 - DNA, 260 bp, Unknown
  Description of Unknown: RightRegion for integrase B7692 sequence
gtcattaaagaaattagaattgataatgaccagaatatcacgggtgttgtttttgggtagtgttgtactaattgaacactacccgtcggctcgtcggcaaggatgattgccggtttgctggctaaagctcttgcaatggcgacgcgctgctgctggccgccggaaagagtgttgggcatattgtagagtttcttttccagccccagcaaagccacgatctctttgataaatttctgatccggctttttcccgtcaagctg

SEQ ID NO: 33692 - DNA, 85 bp, Unknown
  Description of Unknown: RightRegion for integrase B7693 sequence
gtcattaaagaaataaggattgacaatgaccagaatatcacgggtgttgtttttgggtagtgttgtactaattgaacactacccg

SEQ ID NO: 33693 - DNA, 131 bp, Unknown
  Description of Unknown: RightRegion for integrase B7694 sequence
gtcattaaagaaattagaattgataatgaccagaatatcacgggtgttgtttttgggtagtgttgtactaatgtgacactacccgtcggttcatcggcaaatatcaccttgggcctcgtcacaaacgccct

SEQ ID NO: 33694 - DNA, 260 bp, Unknown
  Description of Unknown: RightRegion for integrase B7695 sequence
gtcattaaagaaattagaattgataatgaccagaatatcacgggtgttgtttttgggtagtgttgtactaatgtgacactacccgtcggctcatcagccaatatgatagaaggttttgctgccagcgctctggctatcgcaaccctctgctgctggcctcctgacagctggttaggcatggaaaatttcttttccgataagccgagcacatccataattttatctacatacacagtgtctatcttcgttccatccagctc

SEQ ID NO: 33695 - DNA, 139 bp, Unknown
  Description of Unknown: RightRegion for integrase B7696 sequence
gtcattaaagaaattagaattgataatgaccagaatatcacgggtgttgtttttgggtagtgttgtactaattgaacactacccgtaggttcatctgccaaaacaacagaacattttttcatcataagacgagctaaag

SEQ ID NO: 33696 - DNA, 260 bp, Unknown
  Description of Unknown: RightRegion for integrase B7697 sequence
gccattaaagaaattagaattgataatgaccagaatatcacgggtgttgtttttgggtagtgttgtactaatgtgacactacccgtaggctcatctgccagtaccagctccggcttgattatcaaggctcttgctaccgccgcacgctgtttctgtccgccagatacttcataaggatattttccaagaatatcaagaattccaagctgcgccgcaatcggtgttatgcgccgctccatctctttataatccacaccgga

SEQ ID NO: 33697 - DNA, 260 bp, Unknown
  Description of Unknown: RightRegion for integrase B7698 sequence
gtcattaaagaaattagaattgataatgaccagaatatcacgggtgttgtttttgggtagtgttgtactaatgtgacactacccgtaggttcatccgccaaaatcagtttgggctttgcgattaacgcccgtccaatggcgacacgctgctgctgtccgccggatagttgattcggcaggtggtaccgacgttcggtaaggcccaagagatccaagatttcttctaccgctgccggatctggcttgcgatagtccaagag

SEQ ID NO: 33698 - DNA, 260 bp, Unknown
  Description of Unknown: RightRegion for integrase B7699 sequence
gtcattaaagaaattagaattgataatgaccagaatatcacgggtgttgtttttgggtagtgttgtactaatgtgacactacccgtcggttcatcagcaagtattatctgcggattagttataagtgcccttgctactgctgctctttgcttctgtccaccagatacctcatagggatatttatccagaagttgttctataccaagtcttttagaaagcggctttaccctttcttccatctcgttatattttttccctga

SEQ ID NO: 33699 - DNA, 260 bp, Unknown
  Description of Unknown: RightRegion for integrase B7700 sequence
gtcattaaagaaattagaattgataatgaccggaatatcacgggtgttgtttttgggtagtgttgtactaattgaacactacctgtaggctcatccgcaagcacaatggcgggcttggtaatcagcgccctggctattgccacccgctgctgctgtccgcctgacagctgattgggcatgctgtccagcttttccttcaaagacaggatatccacgatccggtcaaacagcgccaaatccactgcttccccgtccagctc

SEQ ID NO: 33700 - DNA, 260 bp, Unknown
  Description of Unknown: RightRegion for integrase B7701 sequence
ataataaaacagatacaccttaatgatgattgcacaataaaagaggtagattttttgtaaattattttgtactaattatattgccccatttggtgccgataagacaatgaccgccgttctctccggcgaggcagatatcggctttatgggatcagaagcttccatctacacttacaacgaaggggctaatgattatgtcgtcaactttgcacagctgacacagcgcgcaggcaacttccttgtcgcccgggaagaaatgc

SEQ ID NO: 33701 - DNA, 260 bp, Unknown
  Description of Unknown: RightRegion for integrase B7702 sequence
gtcattaaagaaattagaattgataatgaccagaatatcgcgggtgttgtttttgggtagtgttgtactaatgtgacactacccgtcggttcatcagctaaaatcagtttcggttcattgattaaggctctagcacaagcacaacgctgtttttgtccgccagaaacttcataaggaaatttcgataaaatatcacgaatacccaatttatcggcgatagcatgaactcttttctcaatatcagtagggttctgtttgtt

SEQ ID NO: 33702 - DNA, 260 bp, Unknown
  Description of Unknown: RightRegion for integrase B7703 sequence
gtcattaaagaaataagaattgacaatgaccagaatatcacgggtgttgtttttgggtagtgttgtactaactgaacactacccgtgggctcatcagcaagaataagctttgggttcgtaataatggctcttgcacttgctaccctctgcttctgtccgcctgacatctgataaggatatttgtttaatacatcttcaataccaagctctcttgcagtctgtcttactcttaattcaatctcccttgccggaacattctg

SEQ ID NO: 33703 - DNA, 260 bp, Unknown
  Description of Unknown: RightRegion for integrase B7704 sequence
gtcattaaagaaattagaattgataatgaccagaatatcacgggtgttgtttttgggtagtgttgtactaacttaacactaccagttggctcatctgccaataagagtttcggattgttgataattgctcttgcacaggcacaacgctgtttttgaccgcccgatacctgataaggatatttgtttagcatatcgctgatattcagctttccggctatatccaaaatgctgggttctacactcccggcagggactttatt

SEQ ID NO: 33704 - DNA, 138 bp, Unknown
  Description of Unknown: RightRegion for integrase B7705 sequence
gtcattaaagaaattagaattgataatgaccagaatatcacgggtgttgtttttgggtagtgttgtactaatgtgacactacccgtcggttcatctgcaagcaggatatccggatcattcactaatgcccgggcaatc

SEQ ID NO: 33705 - DNA, 260 bp, Unknown; identical to SEQ ID NO: 33700
  Description of Unknown: RightRegion for integrase B7706 sequence

SEQ ID NO: 33706 - DNA, 260 bp, Unknown
  Description of Unknown: RightRegion for integrase B7707 sequence
acacacgtagatacgtgtgccccaataaatttatttatctttctattttccattaaataattctccttaatttctcttcttagtatcttatactaattatatcataaattaataaataaataaattagaattattctttaaaatatttttaaataatttatagaatagtggaagaaggaaaggttaaagtttaaatatgagtagccaaataaaaaaaagaaagaaaatatattaaaatttactttttttatattttaaat

SEQ ID NO: 33707 - DNA, 260 bp, Unknown
  Description of Unknown: RightRegion for integrase B7708 sequence
gtcattaaagaaattagaattgataatgaccagaatatcacgggtgttgtttttgggtagtgttgtactaacgtgacactacccgtaggctcatcacataaaatagcttccggagatactgcaagcgcccttgcgattgcaactctttgttgttcaccgccggacaaattgattgggtaatcattttccttgctttctaagccgacactttttagcaagcctgtaattatctcgtgacgctgtttggcggtaaacgactt

SEQ ID NO: 33708 - DNA, 86 bp, Unknown
  Description of Unknown: RightRegion for integrase B7709 sequence
gtcattaaagaaattagaattgataatgaccagaatatcacgggtgttgtttttgggtagtgttgtactaatgtgacactacccgt

SEQ ID NO: 33709 - DNA, 260 bp, Unknown; identical to SEQ ID NO: 33700
  Description of Unknown: RightRegion for integrase B7710 sequence

SEQ ID NO: 33710 - DNA, 260 bp, Unknown
  Description of Unknown: RightRegion for integrase B7711 sequence
tctctccgtaaagaaaaagaaaagcaggaacgtgccttgcaacgtttgcaagatttatagctgtattcagacaaatcaatgtctgaaaaagactttattcttcgaaaaagtgaaatatcggatcacctaaaaagcatcaatgcccaacttggtctcattacccagaatacagactcttttctgtctgacgaagaatttataaagcaagccagtcatcttctcatacagaaggaattaaaaaaccggaaatatatctacta

SEQ ID NO: 33711 - DNA, 260 bp, Unknown
  Description of Unknown: RightRegion for integrase B7712 sequence
gtcattaaagaaattagaattgataatgaccagaatatcacgggtgttgtttttgggtagtgttgtactaatgtgacactacccgtcggttcatctgccagcaaaatagcaggttttgccgctaaagcccttgcaattgccactctctgctgctgtcccccggataaagcacttggcagattttccaattttgtccgaataccaagtgtatcaatgatttcatctacatatttcttttcaatctttttgccatccagttt

SEQ ID NO: 33712 - DNA, 260 bp, Unknown
  Description of Unknown: RightRegion for integrase B7713 sequence
ataataaaaaaaatagaaatagatgacaataaagaagtctttattcatcttaatttttaaaaagaccaattagcaataagccgattggtcttttcttctataaataaattaaagttcacttactggtttcttccaagttcctaatataaaggctgttacaagtgaaccgataactactgatacaagatacattactgggtttgtaactactgggaaaacgaatattccaccatgtggtgctggtaacaatactccaaaga

SEQ ID NO: 33713 - DNA, 260 bp, Unknown
  Description of Unknown: RightRegion for integrase B7714 sequence
ataataaaacagatacaccttaatgatgattgcacaataaaagaggtagattttttgtaaattattttgtactaattatattgccccatttggcgccgataagacaatgaccgccgttctctccggcgaggcagatatcggctttatgggatcagaagcttccatctacacttacaacgaaggggcaaaggattatgtcgtcaactttgcacagctgacacagcgcgcaggcaacttccttgtcgcccgggaagaaatgc

SEQ ID NO: 33714 - DNA, 260 bp, Unknown
  Description of Unknown: RightRegion for integrase B7715 sequence
gtcattaaagaaattagaattgataatgaccagaatatcacgggtgttgtttttgggtagtgttgtactaatgtgacactacccgtcggttcatcggcaaggatcatttggggatgtaagatcagagcccttgctgccgcaacacgctgacgctggccgccggacatcttggacggaaacttatccagaacatcagtgatttccagatagtcagccaactgcttcagccgctggctgctttctgcttcggataccccatg

SEQ ID NO: 33715 - DNA, 260 bp, Unknown
  Description of Unknown: RightRegion for integrase B7716 sequence
acaatacaggagatttacctaaatgatgacaatacgattaaagctgtagattttttataatctgttttgtactaagtgtttagccccatttggagccgacaaaacgatgactgctgtactttctggtgaagcagatatcggatttatggggtcggaagcttccatttacacgtataacgaaggcgcttctgactttgttgtaaactttgcccagctcacccagcgcgcaggcaattttcttgttgccagagaagagaggc

SEQ ID NO: 33716 - DNA, 260 bp, Unknown
  Description of Unknown: RightRegion for integrase B7717 sequence
ataataaaacagatacaccttaatgatgattgcacaataaaagaggtagattttttgtaaattattttgtactaattatattgccccatttggggttacatacttagtacaaaataaatttaaactaagatgatacaatatattctttttcatcctcccctcattgcgaagggaggatatttttataccaatctaagctcaatcgcttcgatcttcttgttcatgccgaccgttccgatcatgccggacgtccaacgagt

SEQ ID NO: 33717 - DNA, 162 bp, Unknown
  Description of Unknown: RightRegion for integrase B7718 sequence
ataataaaaaaaatagaaatagatgagaataaagaagtttttattcatcttaatttttaaaaaaagaccaattagcaataagccgattggtctttcttctataataaattaaagttcattcactggttttttccaagctcctaatataaaggctgtaaccag

SEQ ID NO: 33718 - DNA, 260 bp, Unknown
  Description of Unknown: RightRegion for integrase B7719 sequence
gtcattaaagaaattagaattgataatgaccagaatatcacgggtgttgtttttgggtagtgttgtactaatgtgacactacccgtcggttcatctgctaatatcaatttgggattgtttacaaaagcccttgcacaagcacacctttgtttttgccctcccgacacatgggcgggtaatttaccagctatatcactaatgttcagccgttgcataagtcgtttgacaattttttctatttctttccccggaatcccctt

SEQ ID NO: 33719 - DNA, 109 bp, Unknown
  Description of Unknown: RightRegion for integrase B7720 sequence
ataataaaaaaaatagaaatagatgataataaagaagttttcattcatcttaatttttaaaaaaagaccaattagcaataagccgattggtctttctctttatataatc

SEQ ID NO: 33720 - DNA, 260 bp, Unknown; identical to SEQ ID NO: 33700
  Description of Unknown: RightRegion for integrase B7721 sequence

SEQ ID NO: 33721 - DNA, 260 bp, Unknown
  Description of Unknown: RightRegion for integrase B7722 sequence
gtcattaaagaaattagaattgataatgaccagaatatcacgggtgttgtttttgggtagtgttgtactaatgtgacactacccgttggctcatctgccaataagagtttcggattgttgataattgctcttgcacaggcacaacgctgtttttgaccgcccgatacctgataaggatatttgtttagcatatcgctgatattcagctttccggctatatccaaaatgctgggttctacactcccggcagggactttatt

SEQ ID NO: 33722 - DNA, 260 bp, Unknown
  Description of Unknown: RightRegion for integrase B7723 sequence
ttgctgatcagcgagattgaagttgccaacgattccatcaagattcactggcgtttttaaataattttagaaactttcatttcaatcaacgtaaacgcagatttatttttgctctgactttttttaatcattgatacatcccccctaaactggaatacaacggcaaaagcatcgacaaataacatccaataataatgagcgcgatcacaagaaataaaaccggctgaacaagcgatatcagaccatcaatctggcgaacc

SEQ ID NO: 33723 - DNA, 260 bp, Unknown
  Description of Unknown: RightRegion for integrase B7724 sequence
gccattaaagaaattagaattgataatgaccagaatatcacgggtgttgtttttgggtagtgttgtactaatgtgacactacccgtgggctcatccgccaggattaaggacggatctcctgcgagagcccgcgcgatggagactcgctgctgctggccgccggagagctggttcggaagattcttccatttttcgtcgagaccgaccttttttaaggaattcatggcccgctcccgccgttctttcttgtcgtaaccggc

SEQ ID NO: 33724 - DNA, 260 bp, Unknown
  Description of Unknown: RightRegion for integrase B7725 sequence
gtcattaaagaaattagaattgataatgaccagaatatcacgggtgttgtttttgggtagtgttgtactaatgtgacactacccgttggctcatcagccaaaattaattcgggatttgttattatcgcacgtgccactgctgccctttgcttctgtcctcctgacacctcgtatggatatttattaagcagcttttcaattccaagcagtgaagctataggtgcaagccttttttccatatccctatagtccacacctga

SEQ ID NO: 33725 - DNA, 260 bp, Unknown
  Description of Unknown: RightRegion for integrase B7726 sequence
gtcattaaagaaattagaattgataatgaccagaatatcacgggtgttgtttttgggtagtgttgtactaatgtgacactacccgtcggttcatctgccagaatcagctgcggacgggtgatcagtgcgcgggcaaccgccgccctctgcttctgtccgccggaaacctcataaggatatttctcaagcagcacatcgatcccaagcttttcggcaatcggccaaagccgctcctccatctcctgcaccggtgcatctgc

SEQ ID NO: 33726 - DNA, 260 bp, Unknown
  Description of Unknown: RightRegion for integrase B7727 sequence
gtcattaaagaaattagaattgataatgaccagaatatcacgggtgttgtttttgggtagtgttgtactaatgtgacactacccgtgggctcatcacacaacaggatatctggatttttaataagtgctcttcctattgaagttctctgctgctgtccgcccgataactgattaggcttcttatcagcatggtctgaaagtcctaatgtattaagaatctcatctgtatcaagtgccttatcacttaggtaagcaccaac

SEQ ID NO: 33727 - DNA, 150 bp, Unknown
  Description of Unknown: RightRegion for integrase B7728 sequence
gtcattaaagaaataagaattgataatgaccagaatatcacgggtgttgtttttgggtagtgttgtactaattgaacactacccgtcggctcatctgcaaatataatttccggacgattcaccagtgctcttgcaattgctactctctgc

SEQ ID NO: 33728 - DNA, 260 bp, Unknown
  Description of Unknown: RightRegion for integrase B7729 sequence
gtcattaaagaaattagaattgataatgaccagaatatcacgggtgttgtttttgggtagtgttatactaatgtgacactacccgtaggctcatcacataaaatggcttccggagatactgcaagcgcccttgcgattgcaactctttgttgttcaccgccggacaaattgattgggtaatcattttccttgctttctaagccgacactttttagcaagcctgtaattatctcgtgacgctgtttggcggtaaacgactt

SEQ ID NO: 33729 - DNA, 260 bp, Unknown
  Description of Unknown: RightRegion for integrase B7730 sequence
gtcattaaagaaattagaattgataatgaccagaatatcacgggtgttgtttttgggtagtgttgtactaatgtgacactacccgtaggttcatccgccaaaatcagtttgggctttgtgattaacgcccgtccaatggcgacacgctgctgctgtccgccggatagttgattcggcaggtggtgccgacgttcggtaaggcccaagagatccaagatttcttctacctctgccggatctggcttgcgatagtccaagag

SEQ ID NO: 33730 - DNA, 260 bp, Unknown
  Description of Unknown: RightRegion for integrase B7731 sequence
tccttcgtgcagtcaatcactgttcacgaggacggagaaatggatattgtttttttatgatcttgtttctactaactacgcatcgcccgtcggctcatctgcaaggatcagcttgggctgcgtgatcagcgctcttgccactgccgccctttgtttctgaccgccggatacttcatatggaaacttcttcaaaagttgagtgattccaagctgctgtgcaattggtttgagtttctgactcatctccggatactttttgc

SEQ ID NO: 33731 - DNA, 260 bp, Unknown
  Description of Unknown: RightRegion for integrase B7732 sequence
acaatcaagcagattcacctaaatgaagactctacgatcaagtttgttgattttttgtagtgcgtctctgtctgggaggcgcgctccaaaaccggtaactagcgtcagctcaatgccttcatcctcaaaatatccttcttcaatcgccacatacatcggagcataaaagatagaatgtgccacctcattcaacgttacagacactaatttcttctcttctgtttcttttgtatcttttactgtctgactaagctccgaag

SEQ ID NO: 33732 - DNA, 260 bp, Unknown
  Description of Unknown: RightRegion for integrase B7733 sequence
tctttcattaaatctattgtcgtttacgaagatggcagtatggacattaattttttataattttttatttatactaactgtacttaaccattaggttatcaatagttagtataaatgttgttttgtgcattttgcctttttctttgctgtgatctgtgtctgatcgtagccgtctcgttgtcaatttgcacagaaggcaacgactttcccggtcgctgccttcttttaaattattccatttcttttatgattgttttttc

SEQ ID NO: 33733 - DNA, 130 bp, Unknown
  Description of Unknown: RightRegion for integrase B7734 sequence
ataaaaaaaatagatttaatttcaagcaagccgccagaatttaaaatctatttaaaataaaaaggtatactaattatggtgcgaagagagagacttgaactctcacgtctgggacactagatcctaagtc

SEQ ID NO: 33734 - DNA, 260 bp, Unknown
  Description of Unknown: RightRegion for integrase B7735 sequence
gagtttgttgaacgtatagaactatttgatgatgaggtaattattaaatataaattttaggtacatagtgttatttacactaataaacaaaaccatatacctaaattattacatttatacaaaccgatagacaacacgaacatatattcggtataattatattgctaggaggccgatattatgaaaactaattatgtaggagtagttgaaaagattagaatgttaagtatgtacccaaaaatgctagttcgattctcatt

SEQ ID NO: 33735 - DNA, 260 bp, Unknown
  Description of Unknown: RightRegion for integrase B7736 sequence
acgatcaagcagatccacctgaatgaagactctacgatcaagtttgttgattttttgtagtgcgtctctgtctgggaggcgcgctccaaacggggttagctagttaggcagggattactatattataatggctgtttttccctctttttgaagtttcttttgaagtgcttcggcattcgcttttgacttaaacgcacccttctgttcatacacccggtagatcctacctgcagtccccgtcttggtaggcgtagacgtac

SEQ ID NO: 33736 - DNA, 260 bp, Unknown
  Description of Unknown: RightRegion for integrase B7737 sequence
tccttcgtgcagtcaatcactgttcacgaggacggagaaatggatattgtttttttatgatcttgtttctactaactacgcaccgcctgtcggtactgcgtagttagtaaaaacgattcttttgtgcagttttgcttttctctggctccgatcgtggcgcgatctggactttgcaaaaggcaaattgcacaaaaaaagagggccgaacagggaactgctccctgctcggtcctcttttactttctcatcttatttcttca

SEQ ID NO: 33737 - DNA, 260 bp, Unknown
  Description of Unknown: RightRegion for integrase B7738 sequence
tccttcgtgcagtcaatcactgttcacgaggacggagaaatgaatattgtttttttatgatcttgtttctactaactacgcaccgcccgtcggctcgtctgccagaatcagagaaggacgggtaatcaatgcgcggccaatcgccactctctgctgctgaccgccggataactggctcggcaaatggttacggcgttctttcagattaagaacagtaagcagttcttccagatattttttgtccggcttctgatagtcaa

SEQ ID NO: 33738 - DNA, 260 bp, Unknown
  Description of Unknown: RightRegion for integrase B7739 sequence
ataataaagaaaatagaagtaaatgaggagagagaagtttttattcatcttaacttttaaaaaagacagaccaataaattagtctgtctttttcttacattaatataatattattcttgaacaggttttttaataaatcctaagattaaagctgtaactacagaacctactattatagcaactagatacataatagggtttgtcataactggtaatacaaataatccaccatgtggagctggtaattgtaccttaaagaa

SEQ ID NO: 33739 - DNA, 260 bp, Unknown
  Description of Unknown: RightRegion for integrase B7740 sequence
acgatcaagcagattcacctaaatgaagactctacgatcaagtttgttgattttttgtagtgcgtctctgtctgggaggcgcgctccaaacggggttaaccagttaggcagagattactatattataatggctgccatttcctcttttttacgacctatgctttctttttaataagcacagcactatccaggatctccaacgtgacagctctgtcttctggtgttactcctaatgctttaatagcatctgccggaaggga

SEQ ID NO: 33740 - DNA, 109 bp, Unknown
  Description of Unknown: RightRegion for integrase B7741 sequence
acgatcaagcagatccacctgaatgaagactctacgatcaagtttgttgattttttgtagcgcgtttctgcctgaggggcgcgctccaaaaccggtaactagcgtcagc

SEQ ID NO: 33741 - DNA, 260 bp, Unknown
  Description of Unknown: RightRegion for integrase B7742 sequence
tccttcgtgcagtcaatcactgttcacgaggacggagaaatggatattgtttttttatgatcttgtttctactaactatgcaccgcctgtcggttcgtccgcaaggatcagcttcggatctgtgatcagtgcccttgcaactgctgctctctgcttctgtccgccggaaacctcgtaggggaatttttccagaagctggttgatgtgaagggcttttgcaatgggacggatcttctgctccatctcctgataatcttccc

SEQ ID NO: 33742 - DNA, 260 bp, Unknown
  Description of Unknown: RightRegion for integrase B7743 sequence
tccttcgtgcagtcaatcactgttcacgaggacggagaaatggatattgtttttttatgatcttgtttctactaactacgcaccgcccgtcggtactgcgtagttagtaaaaacgattcttttttgcagttttgcttttctctggctctgatcggggcgcgatctggactttgcaaaaggcaaattgcacaaaaaaagagggccgaacagggaactgctccctgcccggtcctcttttactttctcatcttatttcttca

SEQ ID NO: 33743 - DNA, 133 bp, Unknown
  Description of Unknown: RightRegion for integrase B7744 sequence
gagtttgttgaacgtatagaactatttgatgatgaggtaattattaaatataaattttaggtacatagtgttatttacactaataaacaaaaccatatacctaaaatattacatttatacaaatcgatagaca

SEQ ID NO: 33744 - DNA, 109 bp, Unknown
  Description of Unknown: RightRegion for integrase B7745 sequence
acgatcaagcagatccacctgaatgaagactctacgatcaagtttgttgattttttgtagcgcgtttctgcctgaggggcgcgctccaaagccagtaaccagcgtcagg

SEQ ID NO: 33745 - DNA, 260 bp, Unknown
  Description of Unknown: RightRegion for integrase B7746 sequence
tccttcgtgcagtcaatcactgttcacgaggacggagaaatggatattgtttttttatgatcttgtttctactaactacgcaccgcctgttggttcatctgctaaaataagtttcggttttgtaatcaaggctctgccgattgctacacgttgctgttgtcctcccgataactggctcggtaagtgataacggcgctcggttaatccaagaagatttaggatttcttctacttctttcgggtcgggtttacgatagtcca

SEQ ID NO: 33746 - DNA, 260 bp, Unknown
  Description of Unknown: RightRegion for integrase B7747 sequence
acgatacaggagatttacctaaatgatgacaatacgattaaagctgtagattttttataatctgttttgtactaagtgtttagccccatttggggcagtataattagtacaaaataaatgatacaatattcaggacggcagatccatccgtccaacactcatatatgccgcccgtaaaaaggtgtgcatcatttcggttgtcaggatcatcccttctggcagccggaatttaaaagtatttccgggtatctctataaact

SEQ ID NO: 33747 - DNA, 260 bp, Unknown
  Description of Unknown: RightRegion for integrase B7748 sequence
tccttcgtgcagtcaatcactgttcacgaggacggagaaatggatattgtttttttatgatcttgtttctactaactacgcaccgcctgtcggtactgcgtagttagtagaaacgattcttttgtgcagttttgcttttctctggctccgatcggggcgcgatctggactttgcaaaaggcaaattgcacaaaaaagagggccgaacagggaactactccctgcccggtcctcttttgctttctcatcttatttcttcag

SEQ ID NO: 33748 - DNA, 260 bp, Unknown
  Description of Unknown: RightRegion for integrase B7749 sequence
tccttcgtgcagtcaatcactgttcacgaggacggagaaatggatattgtttttttatgatcttgtttctactaactacgcaccgcccgttggctcatcagccaaaattaattcgggatttgttattatcgcacgtgccactgctgccctttgcttctgtcctcctgacacctcgtatggatatttattaagcagcttttcaattccaagcagtgaagctataggtgcaagccttttttccatatccctatagtccacac

SEQ ID NO: 33749 - DNA, 260 bp, Unknown
  Description of Unknown: RightRegion for integrase B7750 sequence
tccattgtcaaggaaatccgtgttgaccatgacaaaaacattcatattatttttttatgattgttgtactactaacttaccccctccggtcggtaggttcaacttagtagtatgaaaaattctttatattttttacgtgttttacgtgtttttctattgactttacgtgttttacgtgttattataatcatgtaaggaggaaacaatacaaatgagatttcgagaacttgaaagattagtcctcgatgacggatgggttc

SEQ ID NO: 33750 - DNA, 260 bp, Unknown
  Description of Unknown: RightRegion for integrase B7751 sequence
tccttcgtgcagtcaatcactgttcacgaggacggagaaatggatattgtttttttatgatcttgtttctactaactacgcacctcctgtcggtactgcgtagttagtaaaaacgattcttttgtgcagttttgcttttctctggctccgatcggggcgcgatctggactttgcaaaaggcaaattgcacaaaaaagagggccgaacagggaactgctccctgcccggtcctcttttactttctcatcttatttcttcag

SEQ ID NO: 33751 - DNA, 260 bp, Unknown; identical to SEQ ID NO: 24868
  Description of Unknown: RightRegion for integrase B7752 sequence

SEQ ID NO: 33752 - DNA, 260 bp, Unknown
  Description of Unknown: RightRegion for integrase B7753 sequence
acaatacaggaaatttatctaaacgaagacaatacgattaaaggtgttgattttatttagtgcgtcttgtactaaacatctagccccatttggagccgacaaaacgatgactgctgtactttctggtgaagcagatatcggatttatggggtcggaagcttccatttacacgtataacgaaggcgcttctgactttgttgtaaactttgcccagctcacccagcgcgcaggcaattttcttgttgccagagaagagaggc

SEQ ID NO: 33753 - DNA, 260 bp, Unknown
  Description of Unknown: RightRegion for integrase B7754 sequence
tccttcgtgcagtcaatcactgttcacgaggacggagaaatggatattgtttttttatgatcttgtttctactaactacgcaccgcctgtcggttcatctgctaaaatcaggttagcatccatcataagtcctctggcaattgcaactctttgtttttgccctccacttaatgtctgtactttccgattcgttaactctgcaatatgcaaatattccaaaatttcctgcgcgcgtatatttgcactttttatgcttcttt

SEQ ID NO: 33754 - DNA, 260 bp, Unknown
  Description of Unknown: RightRegion for integrase B7755 sequence
tccttcgtgcagtcaatcactgttcacgaggacggagaaatggatattgtttttttatgatcttgtttctactaactacgcaccgcccgtcggttcatcagcaaggataatcgcaggcttcgtaattaaagctcgtgcaatcgctacacgttgctgttgaccgcctgaaagattgttcggcatattttccagtttatcttctaaagccaacatatacacaacttcgtccataaatttctggtctactgtatcgccatcca

SEQ ID NO: 33755 - DNA, 260 bp, Unknown
  Description of Unknown: RightRegion for integrase B7756 sequence
attataaaagaaatacatatcaatacgagccatgaggtcaccggcatcgatttctattaaccaataaaagtgtcttgtactaactataccgccccatttggcgcagataaagtcatgaccgccgtcctctccggcgaagccgacatcggattcatgggttccgagtcttcaatctatacctataatgagggggcaaccgattatgttgtaaactttgcccaattgacacagcgtgcaggaaacttccttgtctcccggga

SEQ ID NO: 33756 - DNA, 109 bp, Unknown
  Description of Unknown: RightRegion for integrase B7757 sequence
acaatacgggaaatttatctaaacgaagacaatacgattaaatgcgttgattttatttagtccgtcttgtactaaacatctaactccatttggagccgataaaacaatg

SEQ ID NO: 33757 - DNA, 260 bp, Unknown
  Description of Unknown: RightRegion for integrase B7758 sequence
acgatccgacagattcacctgactcctgaatacaccgttgattttgttgactttatttaagctgtctgcgcctaaattgcgaactccgtttggagccgacaagacaatgactgctgtcatctccggtgaagctgatattggattcatgggatcagaagcatccatctacacatataacgaaggtgctaacgattctgtcgtcaactttgcccaactgactcagcgcgccggtaattttcttgttgccagagaagagatga

SEQ ID NO: 33758 - DNA, 260 bp, Unknown
  Description of Unknown: RightRegion for integrase B7759 sequence
tccttcgtgcagtcaatcactgttcacgaggacggagaaatggatattgtttttttatgatcttgtttctactaactacgcaccgcccgtcggttcatctgccagcaaaatagcaggttttgcagctaaagcccttgcaattgccactctctgctgctgtccaccggatagagcacttggcagattttccaattttgtccgaataccaagtgtatcaatgatttcgtctacatatttcttttcaatcttttttccatcca

SEQ ID NO: 33759 - DNA, 260 bp, Unknown
  Description of Unknown: RightRegion for integrase B7760 sequence
tccttcgtgcagtcaatcactgttcacgaggacggagaaatggatattgtttttttatgatcttgtttctactaactacgcacctcctgtaggttcatcacataaaatggcttccggcgatactgcaagtgcgcgggcaatcgccactctttgttgttcgcctcctgataaattagatggataatcattttcttttccttctaatccaacactttgcaaaagatttcgtattgcttctttccgctgtcttgtattcattt

SEQ ID NO: 33760 - DNA, 260 bp, Unknown
  Description of Unknown: RightRegion for integrase B7761 sequence
accataacttttgatgaattaaataattgttcggatttacccgactcacctcgaccataaaaaagagataccagatgaaaggtatcttttttttatttattagtatgtacaagacttgaacttgcggcaggcttctccgaattcgacgagcaaaagcgaagtgcgaatttgggagaaacagtccggtggactgtttcgtagaaggctagttcagttctgtgtcacctcgaccataaaaaagagataccagatgaaaggta

SEQ ID NO: 33761 - DNA, 260 bp, Unknown
  Description of Unknown: RightRegion for integrase B7762 sequence
ataataaagaaaatagaagtaaatgaggagagagaagtttttattcatcttaacttttaaaaaagacagaccaataaattagtctgtctttttcttacattaatataatattattcttgaacaggttttttaataaatcctaagattaaagctgtaactacagaacctactattatagcaactagatacataatagggtttgtcataactggtaatacaaataatccaccatgtggagctggtaattgaactctaaagaa

SEQ ID NO: 33762 - DNA, 140 bp, Unknown
  Description of Unknown: RightRegion for integrase B7763 sequence
tccttcgtgcagtcaatcactgttcacgaggacggagaaatggatattgtttttttatgatcttgtttctactaactacgcaccgcccgtcggttcatcggcaaggatcatttggggatgtaagatcagagcccttgctg

SEQ ID NO: 33763 - DNA, 260 bp, Unknown
  Description of Unknown: RightRegion for integrase B7764 sequence
tccttcgtgcagtcaatcactgttcacgaggacggagaaatggatattgtttttttatgatcttgtttctactaactacgcaccgcctgtcggctcgtcggcaaggataatagcgggctttgtagccaatgcacgggcaatcgctacacgctgctgctgaccgccagacaggttattcggcatatttttgagcttcttttccaaaccgagcgtatgaatgatctgccgaacaaactccgtatcggctttcgctccgtcaa

SEQ ID NO: 33764 - DNA, 221 bp, Unknown
  Description of Unknown: RightRegion for integrase B7765 sequence
tccttcgtgcagtcaatcactgttcacgaggacggagaaatggatattgtttttttatgatcttgtttctactaactacgcacctcctgttggctcatctgccaataagagtttcggattgttgataattgctcttgcacaggcacaacgctgtttttgaccgcccgatacctgataaggatatttgtttagaatatcgctgatattcagctttccggcta

SEQ ID NO: 33765 - DNA, 260 bp, Unknown
  Description of Unknown: RightRegion for integrase B7766 sequence
acgatacaggagatttacctaaatgatgacaatacgattaaagctgtagattttttataatctgttttgtactaagtgtttagccccatttggagccgacaaaacgatgactgctgtactttctggtgaagcagatatcggatttatggggtcggaagcttccatttacacgtataacgaaggcgcttctgactttgttgtaaactttgcccagctcacccagcgcgcaggcaattttcttgttgccagagaagagaggc

SEQ ID NO: 33766 - DNA, 260 bp, Unknown
  Description of Unknown: RightRegion for integrase B7767 sequence
attataaaagaaatacatatcaatacgaaccatgaagtcaccggcatcgatttctattaacccataaaagtgtcttgtactaactataccgccccatttggagcagataaagtcatgaccgccgtcctctccggtgaagccgacatcggattcatgggttctgagtcttcaatctatacctataatgagggggcaaccgattatgttgtaaactttgcccaattgacacagcgtgccggaaactttcttgtctcccgcga

SEQ ID NO: 33767 - DNA, 260 bp, Unknown
  Description of Unknown: RightRegion for integrase B7768 sequence
tccttcgtgcagtcaatcactgttcacgaggacggagaaatggatattgtttttttatgatcttgtttctactaactacgcaccgcccgtcggctcatctgcaaatataatttccggacgattcaccagtgctcttgcaattgctactctctgctgctgtcctccggataactgatttggcagattataaatccggttttcaatccccagagttgcaataatatcatttacatacgcttcatccacttttcttccatcca

SEQ ID NO: 33768 - DNA, 142 bp, Unknown
  Description of Unknown: RightRegion for integrase B7769 sequence
tccttcgtgcagtcaatcactgttcacgaggacggagaaatggatattgtttttttatgatcttgtttctactaactacgcacctcctgtgggttcatctgccagaatgatagcgggtgctgccgccagcgcacgggcaatg

SEQ ID NO: 33769 - DNA, 109 bp, Unknown
  Description of Unknown: RightRegion for integrase B7770 sequence
gagtttgttgaacgtatagaactatttgatgatgaggtaattattaaatataaattttaggtacatagtgttatttacactttgattcagtgatcctttgaaaatcgtt

SEQ ID NO: 33770 - DNA, 260 bp, Unknown
  Description of Unknown: RightRegion for integrase B7771 sequence
cagaaagccgcggagaaaaccagaatccagcaccagaaaaggaaggagcaggaacaatgagcgaagccagaacctatgaacccacagtcacgcgcgtcaaaacggttcgggtcatcccgccgaccattcagccgttatccgacattcctgccttttcagcgcgccccaggcgcgtggcggcttacgcccgtgtctccaccagcagcgaggaacagctgaccagctatgaggcgcaggtgaagcactataccgagtatatc

SEQ ID NO: 33771 - DNA, 260 bp, Unknown
  Description of Unknown: RightRegion for integrase B7772 sequence
tccttcgtgcagtcaatcactgttcacgaggacggagaaatggatattgtttttttatgatcttgtttctactaactacgcaccgcccgtcggctcgtcggccagcacaatagccggttttgtaatcagggcgcgggcaatcgccacacgctgctgctgtccgccggaaagattgttcggcatatttttcagtttatcttccagccccagcaggtgaacgatctcgtccaaaaacttctgatccaccgtgtccccgtcca

SEQ ID NO: 33772 - DNA, 260 bp, Unknown; identical to SEQ ID NO: 33767
  Description of Unknown: RightRegion for integrase B7773 sequence

SEQ ID NO: 33773 - DNA, 139 bp, Unknown
  Description of Unknown: RightRegion for integrase B7774 sequence
tccttcgtgcagtcaatcactgttcacgaggacggagaaatggatattgtttttttatgatcttgtttctactaactacgcaccgcccgtaggctcatcacataaaatggcttccggagatactgcaagcgcccttgcg

SEQ ID NO: 33774 - DNA, 260 bp, Unknown
  Description of Unknown: RightRegion for integrase B7775 sequence
tccttcgtgcagtcaatcactgttcacgaggacggagaaatggatattgtttttttatgatcttgtttctactaactacgcacctcctgtcggttcgtccgccagcagaagctgtggctgtgtgataactgctcttgcaacggcagctctttgcttttgtcctcccgaaacttcatagggatacttctccagcaagtttttgataccaagtttatctgcaagtggaagaagtcttctttccatttctttatgagatgttc

SEQ ID NO: 33775 - DNA, 109 bp, Unknown
  Description of Unknown: RightRegion for integrase B7776 sequence
ataaaaaaaatagatttaatttcaagcaagccgccagaatttaaaatctatttaaaataaaaaggtatactaattatggtgcgaagagagagacttgaactctcacgtc

SEQ ID NO: 33776 - DNA, 94 bp, Unknown
  Description of Unknown: RightRegion for integrase B7777 sequence
acgatacaggagatttacctaaatgatgacaatacgattaaagctgtagattttttataatctgttttgtactaagtgtttagccccatttgga

SEQ ID NO: 33777 - DNA, 142 bp, Unknown
  Description of Unknown: RightRegion for integrase B7778 sequence
tctttcgtgcagtccattactgttcacgaagacggagaaatggatattgtttttttatgatcttgtttctactaactacgcattgcccgtgggttcatctgccagaatgatagcgggtgctgccgccagcgcacgggcaatg

SEQ ID NO: 33778 - DNA, 133 bp, Unknown
  Description of Unknown: RightRegion for integrase B7779 sequence
gagtttgttgaacgtatagaactatttgatgatgaggtaattattaaatataaattttaggtacatagtgttatttacactaataaacaaaatcatatacctaaaatattacatttatacaaatcgatagaca

SEQ ID NO: 33779 - DNA, 260 bp, Unknown
  Description of Unknown: RightRegion for integrase B7780 sequence
tccttcgtgcagtcaatcactgttcacgaggacggagaaatggatattgtttttttatgatcttgtttctactaactacgcacctcctgtcggctcgtcggccagcacaatagccggtttggtaatcaaggcgcgtgcgatagccacacgctgctgctgtccgccggaaagattgttcggcatgtttttcagtttatcttccagccccagcaggtgaacgatctcgtccaaaaacttctgatccaccgtgtccccgtcca

SEQ ID NO: 33780 - DNA, 260 bp, Unknown
  Description of Unknown: RightRegion for integrase B7781 sequence
tcgtgttcggatatagcgtgtgccgctccaccagatgggaagttgcattttagcctttaataaaggggctgagatgtagcttttctttttactgaaacctccatttgaatgctacatcgaatctatccatcaaaatctttgctggcggtttgctgctgtttatatgatatcatatcgggaccgccgacgaaccgcgagctggctatcagcaatagcgtttcagctgatgaatgcaggaaagaaacatcgtaccgggaaaa

SEQ ID NO: 33781 - DNA, 114 bp, Unknown
  Description of Unknown: RightRegion for integrase B7782 sequence
acgatcaagcagatccacctgaatgaagactctacgatcaagtttgttgattttttgtagtgcgtctctgtctgggaggcgcgctccaaacggggttagctagttaggcagaga

SEQ ID NO: 33782 - DNA, 121 bp, Unknown
  Description of Unknown: RightRegion for integrase B7783 sequence
tccttcgtgcagtcaatcactgttcacgaggacggagaaatggatattgtttttttatgatcttgtttctactaactacgcaccgcccgtcggctcatccgctagcactatagacggtctc

SEQ ID NO: 33783 - DNA, 260 bp, Unknown
  Description of Unknown: RightRegion for integrase B7784 sequence
tctttcgtgcagtccattactgttcacgaagacggagaaatggatattgtttttttatgatcttgtttctactaactacgcacctcccgtaggttcgtcggccaggatgatagccggtttagaaacaagggcgcgggcaatcgctacacgctgctgctgaccaccggacagattgttaggcatactgttcagcttttcatcgagagccagcattttcacgacttcattcatgaaatgcttatcaacggtatcaccatcca

SEQ ID NO: 33784 - DNA, 260 bp, Unknown
  Description of Unknown: RightRegion for integrase B7785 sequence
attataaaagaaatacatatcaatacgagccatgaagtcacaggcatcgatttctattaacccataaaagtgtcttgtactaactataccgccccatttggagcagataaagtcatgaccgccgtcctctccggcgaagccgacatcggattcatgggttctgagtcttcaatctatacctataatgagggggcaaccgattatgttgtaaactttgcccaattgacacagcgtgccggaaactttcttgtctcccgcga

SEQ ID NO: 33785 - DNA, 260 bp, Unknown
  Description of Unknown: RightRegion for integrase B7786 sequence
tcctttgtgcagtcaatcactgttcacgaggacggagaaatggatattgtttttttatgatcttgtttttactaactacgcaccgcccgtcggctcatccgccaaaattatcgccggtcttgtcaccaatgccctggctatcgcagttctctgtttctgtccaccagacaaagcagacggcatcgcatctttcttatcctgcagtccgatttttttgagaatatcttccacttcccgcggctttaccttgcgattatcaa

SEQ ID NO: 33786 - DNA, 260 bp, Unknown
  Description of Unknown: RightRegion for integrase B7787 sequence
tccttcgtgcagtcaatcactgttcacgaggacggagaaatggatattgtttttttatgatcttgtttctactaactacgcacctcctgtcggtactgcgtagttagtaaaaacgattcttttgtgcagttttgcttttctctggctccgatcggggcgcgatctgaactttgcaaaaggcaaattgcacaaaaaaagagggccgaacagggaactgctccctgctcggtcctcttttactttctcatcttatttcttca

SEQ ID NO: 33787 - DNA, 141 bp, Unknown
  Description of Unknown: RightRegion for integrase B7788 sequence
acgatacaggagatttacctaaatgatgacaatacgattaaagctgtagattttttataatctgttttgtactaagtgtttagccccatttggagccgacaaaacgatgactgctgtactttctggtgaagcagatatcgg

SEQ ID NO: 33788 - DNA, 260 bp, Unknown
  Description of Unknown: RightRegion for integrase B7789 sequence
tccttcgtgcagtcaatcactgttcacgaggacggagaaatggatattgtttttttatgatcttgtttctactaaccacgcacctcctgtcggttcatcggcaaggatcatttggggatgtaagatcagagcccttgctgccgcaacacgctgacgctggccgccggacatcttggacggaaacttatccagaacatcagtgatttccagatagtcagccaactgcttcagccgctggctgctttctgcttcggataccc

SEQ ID NO: 33789 - DNA, 260 bp, Unknown
  Description of Unknown: RightRegion for integrase B7790 sequence
acgatacaggagatttacctaaatgatgacaatacgattaaggctgtagattttttataatctgttttgtactaagtattcaaccccatttggagtagtataattagtacaaaataaatgatacaatattcaggacggcaactccatccgcccaacactcatatacgccgcccgtaaaaaggtgtgcatcatttcggttgtcaggatcatcctttctggcaaccggaagctaaaagtatttccgggtatctctataaact

SEQ ID NO: 33790 - DNA, 260 bp, Unknown
  Description of Unknown: RightRegion for integrase B7791 sequence
tccttcgtgcagtcaattactgttcacgaggacggagaaatggatattgtttttttatgatcttgtttctactaactacgcacctcccgtcggttcatcggcaaggatcatttggggatgtaagatcagagcccttgctgccgcaacacgctgacgctggccaccggacatcttggacggaaacttatccagaacatcagaaatttccagatagtcagccaactgcttcagccgctggctgctttctgtttcggctaccc

SEQ ID NO: 33791 - DNA, 260 bp, Unknown
  Description of Unknown: RightRegion for integrase B7792 sequence
acgatacaggagatttacctaaatgatgacaatacgattaaagctgtagattttttataatctgttttgtactaagtgtttagccccatttggagccgataaaaccatgacggctgtactgtccggcgaggcagatatcggctttatgggctcagaagcttccatttatacttacaacgaaggggcttctgattttgttgtaaattttgcacagctcacccagcgcgccggtaattttcttgttgccagagaagaaatgc

SEQ ID NO: 33792 - DNA, 260 bp, Unknown
  Description of Unknown: RightRegion for integrase B7793 sequence
gtcattaaagaaattagaattgataatgaccagaatatcacgggtgttgtttttgggtagtgttgtactaatgtaacactacccgtcggttcatctgccagaatcagctgcggacgggtgatcagtgcgcgggcaaccgccgccctctgcttctgtccgccggaaacctcataaggatatttctcaagcagcacatcgatcccaagcttttcggcaatcggccaaagccgctcctccatctcctgcaccggtgcatctgc

SEQ ID NO: 33793 - DNA, 260 bp, Unknown
  Description of Unknown: RightRegion for integrase B7794 sequence
ataataaagaaaatagaagtaaatgaagagagagaagtttttattcatcttaacttttaaaaaagacagaccaataaattagtctgtctttttcttacattaatataatattattcttgaacaggttttttaataaatcctaagattaaagctgtaactacagaacctactattatagcaactagatacataatagggtttgtcataactggtaatacaaataatccaccatgtggagctggtaattgaactctaaagaa

SEQ ID NO: 33794 - DNA, 109 bp, Unknown
  Description of Unknown: RightRegion for integrase B7795 sequence
acaatacgggaaatttatctaaacgaagacaatacgattaaatgcgttgattttatttagtccgtcttgtactaaacatctagctccatttggagccgacaaaacgatg

SEQ ID NO: 33795 - DNA, 260 bp, Unknown
  Description of Unknown: RightRegion for integrase B7796 sequence
tccttcgtgcagtcaatcactgttcacgaggacggagaaatggatattgtttttttatgatcttgtttctactaactacgcaccgcccgtaggttcatctgccaggatcaccggtggctgggccgcgattgctcttgcaatagccaccctctgctgctgtcctcctgacatttcatttggtctgtgatccatacgtttctcaagccctaccatggtcagtgactctactgccagcttatgtctcgtttttctgtctaccc

SEQ ID NO: 33796 - DNA, 109 bp, Unknown
  Description of Unknown: RightRegion for integrase B7797 sequence
acaatacgggaaatttatctaaacgaagacaatacgattaaatgcgttgattttatttagtccgtcttgtactaaacatctaactccatttggagccgacaaaacgatg

SEQ ID NO: 33797 - DNA, 260 bp, Unknown
  Description of Unknown: RightRegion for integrase B7798 sequence
acgatcaagcagatccacctgaatgaagactctacgatcaagtttgttgattttttgtagtgcgtctctgtcgaggaggcgcgctccaaacggggttagctagttaggcagagacttctatataataatagcctgatagcctttggttttcaactctttaacaagcttctccgcgttccctttcgacttaaatgcaccgacctgaacccggtagatcttatctgcagcctctgtcttcgcgaatgcagacgcacccaccg

SEQ ID NO: 33798 - DNA, 109 bp, Unknown
  Description of Unknown: RightRegion for integrase B7799 sequence
attataaaagaaatacatatcaatacgagccatgaagtcacaggcatcgatttctattaacccataaaagtatcttgtactaactataccgccccatttggagcagata

SEQ ID NO: 33799 - DNA, 109 bp, Unknown
  Description of Unknown: RightRegion for integrase B7800 sequence
attataaaagaaatacatatcaatacgagccatgaagtcacaggcatcgatttctattaacccataaaagtgtcttgtactaactataccgccccatttggagcagata

SEQ ID NO: 33800 - DNA, 143 bp, Unknown
  Description of Unknown: RightRegion for integrase B7801 sequence
tccttcgtgcagtcaatcactgttcacgaggacggagaaatggatattgtttttttatgatcttgtttctactaactacgcacctcctgtcggttcatcggcaaggatcatttggggatgtaagatcagagcccttgctgccg

SEQ ID NO: 33801 - DNA, 260 bp, Unknown
  Description of Unknown: RightRegion for integrase B7802 sequence
tccttcgtgcagtcaatcactgttcacgaggacggagaaatggatattgtttttttatgatcttgtttctactaactacgcaccgcccgttggctcatctgccaataagagtttcggattgttgataattgctcttgcacaggcacaacgctgtttttgaccgcccgatacctgataaggatatttgtttagaatatcgctgatattcagctttccggctatatccaaaatgctgggttctacactcccggcagggactt

SEQ ID NO: 33802 - DNA, 141 bp, Unknown
  Description of Unknown: RightRegion for integrase B7803 sequence
acgatacaggagatttacctaaatgatgacaatacgattaaagctgtagattttttataatctgttttgtactaagtgtttagcctcatttggagccgacaaaacgatgactgctgtactttctggtgaagcagatatcgg

SEQ ID NO: 33803 - DNA, 109 bp, Unknown
  Description of Unknown: RightRegion for integrase B7804 sequence
acgatacaggagatttacctaaatgatgacaatacgattaaggctgtagattttttataatctgttttgtactaagtattcaaccccatttggagccgacaaaacgatg

SEQ ID NO: 33804 - DNA, 260 bp, Unknown
  Description of Unknown: RightRegion for integrase B7805 sequence
acgatacaggagatttacctaaatgatgacaatacgattaaagctgtagattttttataatctgttttgtactaagtgtttagccccatttggggatgtatacttagtacaaaataaatgatacaatattctcaggacggcaactccatccgtccaacactcatatacgcagcccgtaaaaaggtgtgcatcatttcggttgtcaggatcatcccttctggcaaccggaacttaaaagtatttccgggtatctccataaa

SEQ ID NO: 33805 - DNA, 260 bp, Unknown
  Description of Unknown: RightRegion for integrase B7806 sequence
tctttcgtgcagtccattactgttcacgaagacggagaaatggatattgtttttttatgatcttgtttctactaactacgcaccgcccgtaggttcatcacagagaagaatatccggattcttgacgatcgcacggccaattgcagtcctctgctgctgaccacccgataactggttcggtagctttttctgatgatctgtaagtcccaggatctgcagaagctcatccacatccagcgcatggtcacttaaatatgccc

SEQ ID NO: 33806 - DNA, 109 bp, Unknown
  Description of Unknown: RightRegion for integrase B7807 sequence
acaatccaggaaatttatctaaacgaagacaatacgattaaaggtgttgattttatttagtgcgtcttgcactaaacatctagccccatttggagccgacaaaacgatg

SEQ ID NO: 33807 - DNA, 260 bp, Unknown
  Description of Unknown: RightRegion for integrase B7808 sequence
acgatacaggagatttacctaaatgatgacaatacgattaaggctgtagattttttataatctgttttgtactaagtattcaaccccatttggagtagtataattagtacaaaataaatgatacaatattcaggacggcaactccatccgtccaacactcatatacgccgcccgtaaaaaggtgtgcatcatttcggttgtcagcgtcataccttctggcaaccggaacttgaatgtattacctggtatctccaaaaact

SEQ ID NO: 33808 - DNA, 143 bp, Unknown
  Description of Unknown: RightRegion for integrase B7809 sequence
tccttcgtgcagtcaatcactgttcacgaggacggagaaatggatattgtttttttatgatcttgtttctactaactacgcaccgcccgtcggctcatctgcaaatataatttccggacgattcaccagtgctcttgcaattg

SEQ ID NO: 33809 - DNA, 260 bp, Unknown
  Description of Unknown: RightRegion for integrase B7810 sequence
tccttcgtgcagtcaatcactgttcacgaggacggagaaatggatattgtttttttatgatcttgtttctactaactacgcaccgcccgttggttcatctgccaaaagcagtttgggattgttgataattgccctggcacacgcacaacgctgcttctggccgccggaaacctgatagggatacttgtttaaaatatccgtgatattgagcttttgggcaatgtcttggatacgcggatccacatctctggcgggcgttt

SEQ ID NO: 33810 - DNA, 260 bp, Unknown
  Description of Unknown: RightRegion for integrase B7811 sequence
tctttcgtgcagtccattactgttcacgaagacggagaaatggatattgtttttttatgatcttgtttctattaactacgcattgcctgtcggtactgcatagttagtaaaaacgattcttttgtgcagttttgcttttctctggctacgatcggggcgcgatctggactttgcaaaaggcaaattgcacaaaaaagagggccgaacagggaactgctccctgcccggtcctcttttactttctcatcttatttcttcag

SEQ ID NO: 33811 - DNA, 260 bp, Unknown; identical to SEQ ID NO: 33755
  Description of Unknown: RightRegion for integrase B7812 sequence

SEQ ID NO: 33812 - DNA, 260 bp, Unknown
  Description of Unknown: RightRegion for integrase B7813 sequence
tccttcgtgcagtcaatcactgttcacgaggacggagaaatggatattgtttttttatgatcttgtttctactaactacgcaccgcccgtcggtactgcgtagttagtaaaaacgattcttttgtgcagttttgcttttctccggctccgatcggggcgcgatctggactttgtaaaaggcaaattgcacaaaaaagagggccgaacagggaactgctccctgcccggtcctcttttactttctcatcttatttcttcag

SEQ ID NO: 33813 - DNA, 260 bp, Unknown
  Description of Unknown: RightRegion for integrase B7814 sequence
acgatcaagcagattcacctaaatgaagactctacgatcaagtttgttgattttttgtagtgcgtctctgtctgggaggcgcgctccaaaagggcatcccttagaaagcagaacttctatagatctcaaagacactctcgcttatccgcatatcgtcttttccaagcgaagcggcttaagacaggtcattgataaactatttaaaaaatgtggcggttatccggagattgcttattctatggaagaagatcagggtgttg

SEQ ID NO: 33814 - DNA, 260 bp, Unknown
  Description of Unknown: RightRegion for integrase B7815 sequence
tccttcgtgcagtcaatcactgttcacgaggacggagaaatggatattgtttttttatgatcttgtttctactaactacgcaccgcccgtgggttcatctgccagaatgatagcgggtgctgccgccagcgcacgggcaatggctactcgctgctgttgaccgcctgagagctgattgggcagggcatccagacggtcgctcagtccaagcgtctgcacgatctgctgcacaaaagccttgtttacctttccgccatcca

SEQ ID NO: 33815 - DNA, 260 bp, Unknown
  Description of Unknown: RightRegion for integrase B7816 sequence
tccttcgtgcagtcgatcactgttcacgaggacggagaaatggatattgtttttttatgatcttgtttctactaactacgcactgcctgtcggtactgcgtagttagtaaaaacgattcttttgtgcagttttgcttttctctggctccgatcggggcgcgatctggactttgcaaaaggcaaattgcacaaaaaaagagggccgaacagggaactgctccctgctcggtcctcttttactttctcatcttatttcttca

SEQ ID NO: 33816 - DNA, 260 bp, Unknown
  Description of Unknown: RightRegion for integrase B7817 sequence
tccttcgtgcagtcaatcactgttcacgaggacggagaaatggatattgtttttttatgatcttgtttctactaactacgcaccgcccgtcggtactgcgtagttagtagaaacgatttttttgtgcagttttgcttttctctggctccgatcggggcgcgatctggactttgcaaaaggcaaattgcacaaaaaagagggccgaacagggaactactccctgcccggtcctcttttactttctcatcttatttcttcag

SEQ ID NO: 33817 - DNA, 109 bp, Unknown
  Description of Unknown: RightRegion for integrase B7818 sequence
acgatacaggagatttatctaaatgatgacaatacgattaaagctgtagattttttataatctgttttgtactaagtgtttagccccatttggagccgataaaacaatg

SEQ ID NO: 33818 - DNA, 260 bp, Unknown
  Description of Unknown: RightRegion for integrase B7819 sequence
tccttcgtgcagtcgatcactgttcacgaggacggagaaatggatattgtttttttatgatcttgtttctactaactacgcacctcctgtcggctcatctgcaaggatcagcttgggctgcgtgatcagcgctcttgccactgccgccctttgtttctgaccgccggatacttcatatggaaacttcttcaaaagttgagtgattccaagctgctgtgcaattggtttgagtttctgactcatctccggatactttttgc

SEQ ID NO: 33819 - DNA, 260 bp, Unknown
  Description of Unknown: RightRegion for integrase B7820 sequence
tccttcgtgcagtcaatcactgttcacgaggacggagaaatggatattgtttttttatgatcttgtttctactaactacgcaccgcctgtcggttcatctgctaaaatcaggttagcatccatcataagtcctctggcaattgcaactctttgtttttgccctccacttaacgtctgtactttccgattcattaactctgcaatatgcaaatattccaaaatttcctgcgcgcgtatatttgcactttttatgcttcttt

SEQ ID NO: 33820 - DNA, 260 bp, Unknown
  Description of Unknown: RightRegion for integrase B7821 sequence
tccttcgtgcagtcaatcactgttcacgaggacggagaaatggatattgtttttttatgatcttgtttctactaactacgcaccgcccgtcggtactgcgtagttagtaaaaacgattcttttgtgcagttttgcttttctccggctccgatcagggcgcgatctggacttcgtaaaaggcaaattgcacaaaaaaagagggccgaacaggggactgctccctgcccggtcctcttttgctctctcatcttatttcttca

SEQ ID NO: 33821 - DNA, 260 bp, Unknown
  Description of Unknown: RightRegion for integrase B7822 sequence
tctttcatcaaatctattgtcgtctacgaagatggcagtatggacattaattttttatgattttttatttatactaactatacctaaccatttggttatcaatagttagtataaatgttgttttgtgcattttgcctttttctttgctgtgatctgtgtctgatcgtagccgtctcgttgtcaatttgcacaaaaggcaacgactttcccggtcgctgccttcttttaaattattccatttcttttatgattgttttttc

SEQ ID NO: 33822 - DNA, 260 bp, Unknown
  Description of Unknown: RightRegion for integrase B7823 sequence
tccttcgtgcagtcaatcactgttcacgaggacggagaaatggatattgtttttttatgatcttgtttctactaactacgcaccgcccgtcggtactgcgtagttagtaaaaacgattcttttgtgcagttttgcttttctctggctctgatcggggcgagatctggacttcgcaaaaggcaaattgcacaaaaaagagggccgaacagggaactgctccctgcccggtcctcttttactttctcatcttatttcttcag

SEQ ID NO: 33823 - DNA, 143 bp, Unknown; identical to SEQ ID NO: 33808
  Description of Unknown: RightRegion for integrase B7824 sequence

SEQ ID NO: 33824 - DNA, 190 bp, Unknown
  Description of Unknown: RightRegion for integrase B7825 sequence
tccttcgtgcagtcaatcactgttcacgaggacggagaaatggatattgtttttttatgatcttgtttctactaactacgcacctcctgttggctcgtcggccagcacaatagccggtttggtaatcagggcgcgtgcgatagccacacgctgctgctggccgccggaaagattgttcggcatatttttc

SEQ ID NO: 33825 - DNA, 109 bp, Unknown
  Description of Unknown: RightRegion for integrase B7826 sequence
attataaaagaaatacatatcaatacgagccatgaggtcaccggcatcgatttctattaaccaataaaagtgtcttgtactaactataccgccccatttggagcagata

SEQ ID NO: 33826 - DNA, 260 bp, Unknown
  Description of Unknown: RightRegion for integrase B7827 sequence
tccttcgtgcagtcaatcactgttcacgaggacggagaaatggatattgtttttttatgatcttgtttctactaactacgcaccgcccgtcggctcatcagccaaaataatatctggattagaaatcaaactacgggctgcggctacacgctgcttttgaccgccggacatttgcgccggaaactttgaaagaacatcaataattccaagaaatccggctatatcatttaggtgcttttcggctatggaactatctatat

SEQ ID NO: 33827 - DNA, 260 bp, Unknown
  Description of Unknown: RightRegion for integrase B7828 sequence
tctttcgttgaatctattatagtctatgaagatggcagcatggacattaattttttatgattttttatttatactaactatacctaaccgtttggccagcctgcatagaatgctacgtgggtgatgatcgctgcgatttctttctgtgttaccccatgatcctttgcattctgtaaatggaatttcagagaagaatctgtaattccctgtgccatcagtgctacgactgtgataatgcttcttgtctttaaatcaatatc

SEQ ID NO: 33828 - DNA, 260 bp, Unknown
  Description of Unknown: RightRegion for integrase B7829 sequence
tccttcgtgcagtcaatcactgttcacgaggacggagaaatggatattgtttttttatgatcttgtttctactaactacgcacctcctgttggctcatctgctaaaataatagctggctttgttgcaagagcccttgcgatcgcaactctttgctgttgtccaccagataatgttcccggaagcatatctttcttctccgatatccgcaaaagcttcaatattccattcacatattctgtatcaacttttcttccatcaa

SEQ ID NO: 33829 - DNA, 260 bp, Unknown
  Description of Unknown: RightRegion for integrase B7830 sequence
tccttcgtgcagtcaatcactgttcacgaggacggagaaatggatattgtttttttatgatcttgtttctactaactacgcaccgcccgtaggttcgtcggccaggatgatagccggtttagaaacaagggcgcgggcaatcgctacacgctgctgctgaccaccggacagattgttaggcatactgttcatctttccatcgagagccagcattttcacgacttcattcatgaaatgcttatcaacggtatcaccatcca

SEQ ID NO: 33830 - DNA, 109 bp, Unknown
  Description of Unknown: RightRegion for integrase B7831 sequence
ataataaagaaaatagaagtaaatgaagagagagaagtttttattcatcttaacttttaaaaaagacagaccaataaattagtctgtctttttcttacattaatataat

SEQ ID NO: 33831 - DNA, 260 bp, Unknown
  Description of Unknown: RightRegion for integrase B7832 sequence
attatccgggagattcacctgaatactgatcataccgttgactctgttgatttcttatagcgtcttgtactaactggttgactccgtttggggcggataaagttatgaccgccgtcctctccggtgaggcagatattggctttatgggaagtgaatcttcgatttatacttaccaggagggtgcaaatgatgtcatcaaaaacttcgcgcagcttacgcagcgcgccggaaactttctggtcgcacgtgaagaaatgccg

SEQ ID NO: 33832 - DNA, 260 bp, Unknown
  Description of Unknown: RightRegion for integrase B7833 sequence
atcattcaggaaatccatataaatgaagacagtaccataacctccgtcgattttctgtgatgtgtcttgtactaactatactgttccattcggagccgacaaaactatgacggccgtcctctccggaactgccgacatcggctttatgggttcggaagcttctatctacacatataacgagggggcgaatgattatgttgtaaactttgcccagctcacccagcgcgccgggaacttcctggttgccagggaagatatta

SEQ ID NO: 33833 - DNA, 260 bp, Unknown
  Description of Unknown: RightRegion for integrase B7834 sequence
tctttcgttgaatctattatagtctatgaagacggcagcatggacattaattttttatgattttttatttatactaactatacctaaccgtttggttacaaatagttagtataaatatcttttttgtgcaatttgtcttttgtgtggctccgatccggctctgatccatacacttccggaggcataatgcacaaaaggcagcgatcttttgaccgctgccctctttttttactcttcgatttccacttctgtgatctgtg

SEQ ID NO: 33834 - DNA, 260 bp, Unknown
  Description of Unknown: RightRegion for integrase B7835 sequence
gaaatccgtgtatcaaagagtattgggcggaaccggaaatatcaaattatctttttgtaattgttttaccgttaagttaagtttccggtatgctgattcattccagtcatttcattaaataccgtactcttccccacattcgggttacctgccagcgcgatgaccttatcatcttcccggcgttttttgatttcaagtccacagtccacagacttgatccccacagaatctctgcttaaccccataatacgtcctccgtt

SEQ ID NO: 33835 - DNA, 260 bp, Unknown; identical to SEQ ID NO: 33831
  Description of Unknown: RightRegion for integrase B7836 sequence

SEQ ID NO: 33836 - DNA, 137 bp, Unknown
  Description of Unknown: RightRegion for integrase B7837 sequence
tccattgtcaaggaaatccgtgttgaccatgacaaaaacattcatattatttttttatgattgttatactactaactgaacccctccggtcggctcatctgcaaatataatttccggacgattcaccagtgctcttg

SEQ ID NO: 33837 - DNA, 221 bp, Unknown
  Description of Unknown: RightRegion for integrase B7838 sequence
tccattgtcaaggaaatccgtgttgaccatgacaaaaacattcatattatttttttgtgattgttatactactaactgaacccctccggtcggctcgtcggccagcacaatagccggtttggtaatcaaggcgcgggcaatcgccacacgctgctgctggccgccggaaagattgttcggcatatttttcagtttatcttccagccccagcaggtgaacga

SEQ ID NO: 33838 - DNA, 109 bp, Unknown
  Description of Unknown: RightRegion for integrase B7839 sequence
attatccgggagattcacctgaatgctgatcataccgttgactctgttgatttcttatagcgtcttgtactaactggttgactccgtttggggcggataaagttatgac

SEQ ID NO: 33839 - DNA, 109 bp, Unknown
  Description of Unknown: RightRegion for integrase B7840 sequence
attatccgggagattcacctgaatactgatcataccgttgactctgttgatttcttatagcgtcttgtactaactggttgactccgtttggggcggataaagttatgac

SEQ ID NO: 33840 - DNA, 260 bp, Unknown
  Description of Unknown: RightRegion for integrase B7841 sequence
acgatccggcagatctatttaaaaccagattatacgattgactatgttgattttatttaatctgtctgtgcctaaattgtcatccccgtttggagccgataaaacaatgactgccgttatttccggagaagccgatattggatttatgggatctgaagcttccgtttatatgtacagcgaaggagcttccgactatgtcgttaattttgcacagctcacacagcgagccggaaactttctcgttgcacggcaagacaacg

SEQ ID NO: 33841 - DNA, 260 bp, Unknown
  Description of Unknown: RightRegion for integrase B7842 sequence
tcttttattgaatctatccttgtgcacgaagatggaagcatggatatttcttttttgtagctttgtttttactaactacgcaccgcccgtaggctcgtcgcagagcaggatgtccggattttttacaatggcacggccaatggcagttctctgctgctggcctccggaaagctgattgggaagtttccgctgatgttcataaagtcccagggttccaagcagttcatccacatccagcggcctgtcacttaaataggcgc

SEQ ID NO: 33842 - DNA, 260 bp, Unknown; identical to SEQ ID NO: 33831
  Description of Unknown: RightRegion for integrase B7843 sequence

SEQ ID NO: 33843 - DNA, 260 bp, Unknown
  Description of Unknown: RightRegion for integrase B7844 sequence
tcgtttgttgaatcggtgctggtgtatgaggatggaagcatggacattcgttttttgtagtctttgtcgtactaactatgcaccgcctgtcggctcgtcggccagcacgatagccggtttggtaatcagggcgcgtgcaatcgccacacgctgctgctgtccgccggaaagattattcggcatatttttcagtttatcttccagccccagcaggtgaacgatctcgtccaaaaacttctgatccaccgtgtccccgtcca

SEQ ID NO: 33844 - DNA, 260 bp, Unknown
  Description of Unknown: RightRegion for integrase B7845 sequence
atcattcaggagattcacgtgaatgaagacaacgccataacctctgtcgattttctgtgatgcgtcttgtactaactatactgttccattcggagccgacaaaactatgacggccgtcctctccggaactgccgacatcggctttatgggttcggaagcttctatctacacatataacgagggggcgaatgattatgttgtaaactttgcccagctcacccagcgcgccgggaacttcctggttgccagggaagatatta

SEQ ID NO: 33845 - DNA, 260 bp, Unknown
  Description of Unknown: RightRegion for integrase B7846 sequence
tgcttaattgtaaatcgtataataataaaaaccctagaagatatagaagttatcttctagggttttattcttacttttctattaataagtttttatgagtccatccttctttagaatcatatttaatttttatccattctttttctgagtctactctctcaacaaattgattttttttcactattctttttattctggcttgtgaacttggaaactctcttataataactgagtctgatattgttaaataatattttttt

SEQ ID NO: 33846 - DNA, 260 bp, Unknown
  Description of Unknown: RightRegion for integrase B7847 sequence
tccattgtcaaagaaatccgtgttgaccatgacaaaaacattcatattatttttttgtgattgttatactactaactgaacccctccggtcggttcatcggcaagtatgatatctgcattagtcaccaacgcccttgctatcgcaaccctctgctgctgtccacctgacatctttcccggaagcttatttctttccgataatattccaagatgttccatctgctttaatataatcattttcctgtcctttcgctttacat

SEQ ID NO: 33847 - DNA, 260 bp, Unknown
  Description of Unknown: RightRegion for integrase B7848 sequence
tccattgtcaaggaaatccgtgttgaccatgacaaaaacattcatattatttttttgtgattgttatactactaactgaacccctcctgtcggttcgtccgccagaatgatcttcggttctgtgatcagtgctcttgcgattgctgcacgctgtttctgaccgccggacacttcatacggatatttctccagaagcttttcaatggacagtctgcgtgaaagttccatcattttcggtgccatttcactgtaagtctttc

SEQ ID NO: 33848 - DNA, 260 bp, Unknown
  Description of Unknown: RightRegion for integrase B7849 sequence
attatccgggagattcacctgaacactgatcatactgtcgactctgttgatttcttatagcgtcttgtactaactggttgactccgtttggggtagtttagttagtacaagacaatatttattatttcacccgcagtctctgaccaacatagatcacattcggattgctgattccattcagctgcgcaaccttctggtaggacgtgccgtatttagctgcaataccggaaagcgtatctccgctctgcacgatgtaatac

SEQ ID NO: 33849 - DNA, 260 bp, Unknown
  Description of Unknown: RightRegion for integrase B7850 sequence
atcattcaggagattcatgtgaacgaagaccatgccataacctctgtcgattttctgtgatgcgtcttgtactaactatgctgttccattcggtgccgacaagaccatgactgctgtcctttccggaacagccgacatcggatttatgggatcagaagcttccatttatacttataatgaaggggctcatgattatgtcgtgaattttgcacagctcactcagcgagccggaaacttcctggttgccaaagaggatatta

SEQ ID NO: 33850 - DNA, 260 bp, Unknown
  Description of Unknown: RightRegion for integrase B7851 sequence
tccattgtcaaggaaatccgtgttgaccatgacaaaaacattcatattatttttttgtgattgttatactactaactgaacccctccggtcggttcatcagcaaggataatcgcaggcttcgtaattaaagctcgtgcaatcgctacacgttgctgttgaccgcctgaaagattgttcggcatattttccagtttatcttctaaagccaacatatacacaacttcgtccataaatttctggtctactgtatcgccatcca

SEQ ID NO: 33851 - DNA, 260 bp, Unknown
  Description of Unknown: RightRegion for integrase B7852 sequence
tccattgtcaaggaaatccgtgttgaccatgacaaaaacattcatattatttttttgtgattgttatactactaactgaacccctccggtgggttcatccgcaagaattatggcaggctctgccgccaatgctctggctatggcaactctctgctgttgtcctcctgagagctgatttggaagagcgtcaagtctctggtcgagccccagtgtctctgttattttttttacaaattccttatcgactttaccgccatcca

SEQ ID NO: 33852 - DNA, 260 bp, Unknown
  Description of Unknown: RightRegion for integrase B7853 sequence
tccattgtcaaggaaatccgtgttgatcatgacaaaaacattcatattatttttttgtgattgttatactactaactgaacccctccggtcggttcatcagcaaggataatcgcaggcttcgtaattaaagctcgtgcaatcgctacacgttgctgttgaccgcctgaaagattgttcggcatattttccagtttatcttctaaagccaacatatacacaacttcgtccataaatttctggtctactgtatcgccatcca

SEQ ID NO: 33853 - DNA, 260 bp, Unknown
  Description of Unknown: RightRegion for integrase B7854 sequence
tcgtttgttgaatcggtgctggtgtatgaggatggaagcatggacattcgttttttgtagtctttgtcgtactaactatgcaccgcctgtaggctcatcagcaagaataagctttggattagtaataatggctcttgcacttgccactctctgcttctgtcctcctgacatctgataaggatatttgtttaatacatcttcaattcctagctctcttgcagtctgtcttactcttaattcaatctcccttgacggaacat

SEQ ID NO: 33854 - DNA, 260 bp, Unknown; identical to SEQ ID NO: 33840
  Description of Unknown: RightRegion for integrase B7855 sequence

SEQ ID NO: 33855 - DNA, 260 bp, Unknown
  Description of Unknown: RightRegion for integrase B7856 sequence
tcgtttgttgaatcggtgctggtgtatgaggatggaagcatggacattcgttttttataatctttgtcgtactaactctgcaccgcctgttggctcatcagccaaaattaattcgggatttgttattatcgcacgtgccactgctgccctttgcttctgtcctcctgacacctcgtatggatatttattaagcagcttttcaattccaagcagtgaagctataggtgcaagccttttttccatatccctataatccacac

SEQ ID NO: 33856 - DNA, 260 bp, Unknown
  Description of Unknown: RightRegion for integrase B7857 sequence
atcattcaagagattcatgtgaatgaggaccatgccataacctccgtcgattttctgtgatgcgtcttgtactaactatactgttccatttggcgccgacaagaccatgactgctgtcctttccggaacagccgacatcggatttatgggatcggaagcttccatttatacttataatgaaggggctcatgattatgtcgtaaactttgcacagctcactcagcgtgccggaaactttctggttgccagagatgatatta

SEQ ID NO: 33857 - DNA, 260 bp, Unknown
  Description of Unknown: RightRegion for integrase B7858 sequence
tccattgtcaaggaaatccgtgttgaccatgacaaaaacattcatattatttttttgtgattgttatactactaactgaacccctccggtcggctcatctgcaaatataatttccggacgattcaccagtgctcttgcaattgctactctctgctgctgtcctccggataactgatttggcagattataaatcctcttttcaatccccagagttgcaataatatcatttacatacgcttcatccacttttcttccatcca

SEQ ID NO: 33858 - DNA, 260 bp, Unknown
  Description of Unknown: RightRegion for integrase B7859 sequence
tccattgtcaaggaaatccgtgttgaccatgacaaaaacattcatattatttttttatgattgttatactactaactgaacccctccggtcggtaggttcaatttagtagtatgaaaatctctgttattttttacgtattttacgtatatttttattgacattacgtaaaatacgtgttattatatacttgtaaggaggaaacaatacaaatgagatttcgagaaattgaaaaaatagtcctcaatgacggatgggagtt

SEQ ID NO: 33859 - DNA, 109 bp, Unknown
  Description of Unknown: RightRegion for integrase B7860 sequence
attatccggaagattcacctgaacactgatcatactgtcgactctgttgatttcttatagcgtcttgtactaactggttgactccgtttggggcggataaagttatgac

SEQ ID NO: 33860 - DNA, 109 bp, Unknown
  Description of Unknown: RightRegion for integrase B7861 sequence
atcattcaggaaatccatataaatgaagacagtaccataacctccgtcgattttctgtgatgcgtcttgtactaactatactgttccattcggagccgacaaaactatg

SEQ ID NO: 33861 - DNA, 109 bp, Unknown
  Description of Unknown: RightRegion for integrase B7862 sequence
atcattcaggagattcatgtgaacgaagaccatgccataacctccgtcgattttctgtgatgcgtcttgtactaactatactgttccattcggtgccgacaagaccatg

SEQ ID NO: 33862 - DNA, 260 bp, Unknown
  Description of Unknown: RightRegion for integrase B7863 sequence
accatagaggaaattcatttgaatgaagattacacggtagaaagtgttgactttttgtagtgtcttgtactaagtttattactccgtttggagcggataaaactatgacctctgtcctctccggaaatgctgatatcggattcatgggttctgaagcttccatctacacttataacgagggcgcgaatgactatgtggtaaatttcgcccaacttacacagagagccgggaactttctggtcgctcgtgagaaaattgat

SEQ ID NO: 33863 - DNA, 109 bp, Unknown
  Description of Unknown: RightRegion for integrase B7864 sequence
accataggggaaattcatttgaatgaagattacacggtagaaagtgttgactttttgtagtgtcttgtactaagtttattgctccgtttggagcggataaaactatgac

SEQ ID NO: 33864 - DNA, 260 bp, Unknown
  Description of Unknown: RightRegion for integrase B7865 sequence
attatccgggagattcacctgaacactgatcatactgtcgactctgttgatttcttatagcgtcttgtactaactggttgactccgtttggggcggataaagttatgaccgccgtcctctccggtgaggcagatattggctttatgggaagtgaatcttcgatttatacttaccaggagggtgcaaatgatgtcatcaaaaacttcgcgcagcttacgcagcgcgccggaaactttctggtcgcacgtgaagaaatgccg

SEQ ID NO: 33865 - DNA, 260 bp, Unknown
  Description of Unknown: RightRegion for integrase B7866 sequence
attatccgggagattcacctgaatactgatcataccgttgactctgttgatttcttatagcgtcttgtactaactggttgactccgtttggggcggataaagttatgaccgccgtcctctccggtgaggcagatattggctttatgggaagtgaatcttcgatttatacttaccaggaaggtgcaaatgatgtcatcaaaaactttgcgcagcttacgcagcgcgccggaaactttctggtcgcacgtaaagaaatgctg

SEQ ID NO: 33866 - DNA, 260 bp, Unknown
  Description of Unknown: RightRegion for integrase B7867 sequence
attatccgggagattcacctgaatgctgatcataccgtcgactctgttgattttctatagcgtcttgtactaactggttgactccgtttggggcggataaagttatgaccgccgtcctctccggtgaggcagatattggctttatgggaagtgaatcttcgatttatacttaccaggagggtgcaaatgatgtcgtcaaaaacttcgcgcagcttacgcagcgcgccggaaactttctggtcgcacgtgaagaaatgccg

SEQ ID NO: 33867 - DNA, 260 bp, Unknown; identical to SEQ ID NO: 33831
  Description of Unknown: RightRegion for integrase B7868 sequence

SEQ ID NO: 33868 - DNA, 260 bp, Unknown
  Description of Unknown: RightRegion for integrase B7869 sequence
tcgtttgttgaatcagtgctggtgtatgaggacggaagcatggacattcgttttttgtaatctttgtcgtactaactatgcaccgcctgtcggtactgctttgttagtacaatcaatatattgtggttatccacacagttatcctctatatgtggataaaataaaagcaaggcggcgcattgtccgtcttgcttctcttttactccaaaattatcgacattattcttcgatgtattcaaccagcttcggatcgccgctga

SEQ ID NO: 33869 - DNA, 260 bp, Unknown
  Description of Unknown: RightRegion for integrase B7870 sequence
tctatcattcgtgagatccgcgtggatcatgagagaaatgtccgtattatttttttgtgatttttatactactaacttacaccgtcctgtcggtaactttaatttagtagtagtataaatattttgctttcaaaataagcgggaatgctttttagttattcccgcttatttatcatctaatactacttttatttttcttgtcataatctgttgggattacatgccaccctttataactatatcctggacgttgtccttcc

SEQ ID NO: 33870 - DNA, 260 bp, Unknown; identical to SEQ ID NO: 33864
  Description of Unknown: RightRegion for integrase B7871 sequence

SEQ ID NO: 33871 - DNA, 109 bp, Unknown
  Description of Unknown: RightRegion for integrase B7872 sequence
atcattcaggaaatccatataaatgaagacagtaccataacctccgtcgattttctgtgatgtgtcttgtactaactatactgttccattcggagccgacaaaactatg

SEQ ID NO: 33872 - DNA, 260 bp, Unknown
  Description of Unknown: RightRegion for integrase B7873 sequence
attatccgggagattcacctgaatactgatcataccatcgactctgttgatttcttatagcgtcttgtactaactggttaactccgtttggggcggataaagttatgaccgccgtcctctccggtgaggcagatattggctttatgggaagtgaatcttcgatttatacttaccaggagggtgcaaatgatgtcatcaaaaacttcgcgcagcttacgcagcgcgccggaaactttctggtcgcacgtgaagaaatgccg

SEQ ID NO: 33873 - DNA, 260 bp, Unknown
  Description of Unknown: RightRegion for integrase B7874 sequence
tcttttattgacaaaattgtaattgatgtgaacggtaatatagatattatttttttgtgattttattggtactaacatacccgcccccgtcggtgcttcaataaaggctatgttggtatctttatttttaagcagcgtctgctcagcttcataaaacatgcgattccgcaaaatattaatatcctttttatcatcaacacagctctccggattcaatctgcgaatctgttttacccgctccgactgctcatactgtgtgg

SEQ ID NO: 33874 - DNA, 260 bp, Unknown
  Description of Unknown: RightRegion for integrase B7875 sequence
attatccgggagattcacctgaacactgatcatactgtcgactctgttgatttcttatagcgtcttgtactaactggttgactccgtttggggcggataaagttatgaccgccgtcctctctggcgaggcagatattggctttatgggaagtgaatcttcgatttatacttaccaggagggtgcaaatgatgtcatcaaaaacttcgcgcagcttacgcagcgcgccggaaactttctggtcgcacgtgaagaaatgccg

SEQ ID NO: 33875 - DNA, 260 bp, Unknown
  Description of Unknown: RightRegion for integrase B7876 sequence
tcttttgtgcagtccattactgttcacgagaacggagaaatggatattgtttttttataatcttgtttctactaactacgcactgcccgtcggctcatctgccagaaacagcgacggtctggtcacgatcgcccttgcgatcgccaccctctgctgctgtcctccggacagttcggtcggtctgtgcgtccgtcttttcccaagtgccacgcgatccagtgcctcttttacccgccttttgcgttctggtgccggaacgc

SEQ ID NO: 33876 - DNA, 260 bp, Unknown; identical to SEQ ID NO: 33862
  Description of Unknown: RightRegion for integrase B7877 sequence

SEQ ID NO: 33877 - DNA, 260 bp, Unknown
  Description of Unknown: RightRegion for integrase B7878 sequence
gaaatccgtatatcaaggagtgttgagcggaacaggaaatatcagattatttttttgtagttgttttaccattaacttaatcaaccggtcggttaatatcaattaccggtaaatataattataaagaaagaagggggaaaaatggacagaacagtcgaattgttttttgaaataattgaaacttaccagcggcacgcccaaatggctaaaaatacaaaataccaggagacccgcgagatggcgcaaatgataatcgatgt

SEQ ID NO: 33878 - DNA, 109 bp, Unknown
  Description of Unknown: RightRegion for integrase B7879 sequence
aaaaataataatagtaacacaaatactgttaatataaagaaagtacattttatattttaatgtgggttatgtaactatagccgttgcaccggttcctcccatagttgct

SEQ ID NO: 33879 - DNA, 260 bp, Unknown
  Description of Unknown: RightRegion for integrase B7880 sequence
tccattgtcaaggaaatccgtgttgaccatgacaaaaacattcatattatttttttgtgattgttatactactaactgaacccctccggttggctcatctgccataattatttcaggctgtttaacaagtgctcttgcaattgcaactctctgtttctgaccgcctgataattcattaggttttctatcaccaaagccttccaaatcaacctgtttcaaaatactgttgatttcttcatctgtagccttctttccctgaa

SEQ ID NO: 33880 - DNA, 260 bp, Unknown; identical to SEQ ID NO: 33831
  Description of Unknown: RightRegion for integrase B7881 sequence

SEQ ID NO: 33881 - DNA, 260 bp, Unknown
  Description of Unknown: RightRegion for integrase B7882 sequence
tccattgtcaaggaaatccgtgttgaccatgacaaaaacattcatattatttttttatgattgttatactactaactgaacccctccggtaggttcatcggccaacacaattgcaggtttagcaaccaaggctcttgcaatcgccactctctgctgctgaccacctgaaagattatttggcatacttttcagcttatcttccaatcccagcatagtaacaacttcattcataaacttctgatctacggtatctccatcta

SEQ ID NO: 33882 - DNA, 109 bp, Unknown
  Description of Unknown: RightRegion for integrase B7883 sequence
attatccgggagattcacctgaacactgatcatactgtcgactctgttgatttcttatagcgtcttgtactaactagttgactccgtttggggcggataaagttatgac

SEQ ID NO: 33883 - DNA, 142 bp, Unknown
  Description of Unknown: RightRegion for integrase B7884 sequence
tcgtttgttgaatcggtgctggtgtatgaggatggaagcatggacattcgttttttgtagtctttgtcgtactaactatgcaccgcctgtcggctcatccgccaaaattatcgccggtcttgtcaccaatgccctggctatc

SEQ ID NO: 33884 - DNA, 260 bp, Unknown
  Description of Unknown: RightRegion for integrase B7885 sequence
tcgtttgttgaatcggtgctggtgtatgaggatggaagcatggacattcgttttttgtagtctttgtcgtactaactatgtaccgcctgtcggctcatcggcaagcaccagacttggacttgttataattgcccttgcagaagcaactctctgtttctgtccacctgacatctggtagggatatttatttaatatctctgttatatcaagctgttctgctacattttttactgccctgtcaattacctcaggagaatcat

SEQ ID NO: 33885 - DNA, 260 bp, Unknown
  Description of Unknown: RightRegion for integrase B7886 sequence
attatccgggagattcacctgaatactgatcataccgttgactctgttgatttcttatagcgtcttgtactaactggttgactccgtttggggtagtttagttagtacaagacaatatttattattttactcgtaacttctgtcctacatagatcacattcggattgctgattccattcaactgcgcaaccttctggtaggacgtgccgtatttagctgcaataccggaaagcgtatctccagactggacagtgtaatac

SEQ ID NO: 33886 - DNA, 260 bp, Unknown
  Description of Unknown: RightRegion for integrase B7887 sequence
atcattcaggaaatccatataaatgaagacagtaccataacctccgtcgattttctgtgatgcgtcttgtactaactatactattccattcggagccgacaaaactatgacggccgtcctctccggaactgccgacatcggctttatgggttcggaagcttctatctacacatataacgagggggcgaatgattatgttgtaaactttgcccagctcacccagcgcgccgggaacttcctggttgccagggaagatatta

SEQ ID NO: 33887 - DNA, 260 bp, Unknown
  Description of Unknown: RightRegion for integrase B7888 sequence
attatccgggagattcacctgaatactgatcataccgttgactctgttgatttcttatagcgtcttgtactaactggttgactccgtttggggcggataaagttatgaccgccgtcctctccggtgaggcagatattggctttatgggaagtgaatcttcgatttatacttaccaggaaggtgcaaatgatgtcatcaaaaacttcgcgcagcttacgcagcgcgccggaaactttctggtcgcacgtgaagaaatgccg

SEQ ID NO: 33888 - DNA, 260 bp, Unknown
  Description of Unknown: RightRegion for integrase B7889 sequence
tccattgtcaaggaaatccgtgttgaccatgacaaaaacattcatattatttttttgtgattgttatactactaactgaacccctccggttggctcatccgctaagatcagagatggatttgtaatcatcgctcgggcacttgccactctctgcttctgtcctcctgacatttgatatggatatttgttcaatacttctgtgatcatcaacttttctgcgatcgatctgactctgtcttcaatttctcttgcaggaattt

SEQ ID NO: 33889 - DNA, 260 bp, Unknown
  Description of Unknown: RightRegion for integrase B7890 sequence
ataatagattcaatcgaatttataaatgactatagattttatattcatttaaaattctaactggaggtaagcatgacttctattttaaaaaacaaagttaataaaaaatactctataggtaaattagaaaaattgttaaccaaaaaaatttttttatattttgctgataacaattcattggaaatacccccactttataatatttcatattttattgatattgactatattgaatatacagtcaaagactttaaaaaaga

SEQ ID NO: 33890 - DNA, 260 bp, Unknown
  Description of Unknown: RightRegion for integrase B7891 sequence
tccattgtcaaggaaatccgtgttgaccatgacaaaaacattcatattatttttttatgattgttatactactaactgaacccctccggtcggctcatccgctagcactatagatggtctcgtaatcagggctcttcctatagatgtacgctgctgctgtccacctgagagctcatttggcagatgagtacgtctctctgtaagtccaaggcgcaaaagcatgtcatccatctgtgctttttccacctttcttccatcaa

SEQ ID NO: 33891 - DNA, 260 bp, Unknown
  Description of Unknown: RightRegion for integrase B7892 sequence
acaattttgcagatacacctaaacgatgactgtaccgtgaaagaagtagactttttgtgattcgtcttatactaactatataattccatttggggccgacaaaacaatgaccgctgtactctccggagaagcagatatcggattcatgggttcagaagcttctatttatacctataatgaaggtgcaaacgactatgttatcaattttgctcagcttacacaacgtgccggtaattttctcgtggcgcgagaagaaattc

SEQ ID NO: 33892 - DNA, 260 bp, Unknown
  Description of Unknown: RightRegion for integrase B7893 sequence
tccattgtcaaggaaatccgtgttgaccatgacaaaaacattcatattatttttttatgattgttatactactaactgaacccctccggtcggctcatccgcaagtatcagatccggattgttgatcaatgctctggatatcgccactcgctgcttttcacctccggataattcatacggcttcttgttcatcagatgtgtaattccgaactgttctgcatatttctgcgattcttccatacactctttcgcactcttct

SEQ ID NO: 33893 - DNA, 109 bp, Unknown
  Description of Unknown: RightRegion for integrase B7894 sequence
acaatcaaggagatacatctcaacgacgattacactgtaaaagaggttgattttttgtgatttgtcttgtactaattatactattccatttggagccgataaatcaatg

SEQ ID NO: 33894 - DNA, 143 bp, Unknown
  Description of Unknown: RightRegion for integrase B7895 sequence
atcattcaggagattcatgtgaatgaagaccatgccataacctccgtcgattttctgtgatgcgtcttgtactaactgtactgttccattcggagccgacaaaactatgacggccgtcctctccggaactgccgacatcggct

SEQ ID NO: 33895 - DNA, 260 bp, Unknown
  Description of Unknown: RightRegion for integrase B7896 sequence
tctatcattcgtgagatccgcgtggatcacgagagaaatgtccgtattatttttttgtgatttttatactactaacttacaccgtccggtcggttcatctgccagcaaaatagcaggttttgccgctagtgctcttgcgattgccaccctttgctgctgaccccctgacagtgcacttggaagattttccagtttagtccgaatgcccagtgtatctatgatttcatctacataacctttttctaccttttttccatcca

SEQ ID NO: 33896 - DNA, 255 bp, Unknown
  Description of Unknown: RightRegion for integrase B7897 sequence
attatccgggagattcacctgaacactgatcatactgtcgactctgttgatttcttatagcgtcttgtactaactggttgactccgtttggggcggataaagttatgaccgccgtcctctccggtgaggcagatattggctttatgggaagtgaatcttcgatttatacttaccaggagggtgcaaatgatgtcatcaaaaacttcgcgcagcttacgcagcgcgccggaaactttctggtcgcacgtgaagaaa

SEQ ID NO: 33897 - DNA, 109 bp, Unknown
  Description of Unknown: RightRegion for integrase B7898 sequence
attatccgggagattcacctgaacactgatcatactgtcgactctgttgatttcttatagcgtcttgtactaactggttgactccgtttggggcggataaagttatgac

SEQ ID NO: 33898 - DNA, 260 bp, Unknown
  Description of Unknown: RightRegion for integrase B7899 sequence
tccattgtcaaggaaatccgtgttgaccatgacaaaaacattcatattatttttttgtgattgttatactactaactgaacccctccggtcggtaggttcaatttagtagtatgaaaatctctgttattttttacgtattttacgtatatttttattgacattacgtaaaatacgtgttattatatacttgtaaggaggaaacaatacaaatgagatttcgagaaattgaaaaaatagtcctcaatgacggatgggagtt

SEQ ID NO: 33899 - DNA, 90 bp, Unknown
  Description of Unknown: RightRegion for integrase B7900 sequence
tcgtttgttgaatcagtgctggtgtatgaggatggaagcatggacattcgttttttgtagtctttgtcgtactaactatgcaccgcctgt

SEQ ID NO: 33900 - DNA, 138 bp, Unknown
  Description of Unknown: RightRegion for integrase B7901 sequence
tccattgtcaaggaaatccgtgttgaccatgacaaaaacattcatattatttttttgtgattgttatactactaactgaacccctccggtcggctcatccgctagcactatagacggtctcgtaatcagggctcttcc

SEQ ID NO: 33901 - DNA, 109 bp, Unknown
  Description of Unknown: RightRegion for integrase B7902 sequence
attatccgggagattcacctgaacactgatcataccgttgactctgttgatttcttatagcgtcttgtactaactggttgactccgtttggggcggataaagttatgac

SEQ ID NO: 33902 - DNA, 260 bp, Unknown
  Description of Unknown: RightRegion for integrase B7903 sequence
tcgtttgttgaatcggtgctggtgtatgaggatggaagcatggacattcgttttttgtagtctttgtcgtactaactatgcaccgcctgtcggctcatccgcaagcagtatgtccggcttatttgccagtgccaccgctatcgctgcgcgctgctgctctcctcccgatagctgagccggaagcttatccttatgctcctgtaatcccactgcatttaacagtttaagggcatagcttttgttattgtccctgcatctat

SEQ ID NO: 33903 - DNA, 260 bp, Unknown
  Description of Unknown: RightRegion for integrase B7904 sequence
tctttcgttgaatctattatagtctatgaagacggcagcatggacattaattttttatgattttttatttatactaactatacttaaccgtttggccatcctgcataaaatgcgacatgtgtgattactgcggcaatctctttttgtgttacaccatgattttttgcattttgaagatgatattttaaagaagaatctgtaattccggaagccatcagagcaaccactgtgatgatacttcttgtttttacgtcaatatc

SEQ ID NO: 33904 - DNA, 260 bp, Unknown
  Description of Unknown: RightRegion for integrase B7905 sequence
tcatttgttgaatcggtgctggtgtatgaggacggaagcatgtacattcgttttttatagtctttgtcgtactaactctgcaccgcctgtcggttcatcggctaagatcagctgcggctgtgtaatcagcgctcttgcgactgccgcacgctgcttttgtccgccggatacttcatacggatacttttccagcaaatgcgtgatttcaagcttctttgcaatcggttctaatttctgcatcatttgcgggtactgttctc

SEQ ID NO: 33905 - DNA, 260 bp, Unknown
  Description of Unknown: RightRegion for integrase B7906 sequence
tcaatcatccgtgaaatccgtgttgaccatgagaaaaatattcaaattatttttttgtgattgtttatactactatcttacaccctccggtaggttcatcggcaagcacaatcgcaggctttgcaactaaagcccttgcaatcgcaactctctgctgctgtcctcctgagaggttattcggcatattctttagtttatcttccagagccagcatatgaaccacctcgtccataaatccctgatctaccgtatctccatcc

SEQ ID NO: 33906 - DNA, 260 bp, Unknown; identical to SEQ ID NO: 33831
  Description of Unknown: RightRegion for integrase B7907 sequence

SEQ ID NO: 33907 - DNA, 260 bp, Unknown
  Description of Unknown: RightRegion for integrase B7908 sequence
ctgattgaccgaatacttgtcgatacggggggtgtatgtatcgattgggcgtttatgtagaggggattttcacacgctctataaaaattatacgaaattcgctctttacctgtaaaaaggttttttacaggtaaatgatggtgtattttccgcttatataacaataaaaaagacgcagggaatatccttgcgtcttttgcaattaaaggcccagttctctggcttttcgcgctacatattcagccagggcttggttggca

SEQ ID NO: 33908 - DNA, 260 bp, Unknown
  Description of Unknown: RightRegion for integrase B7909 sequence
atcattcaggagattcatgtgaatgaagaccatgccataacctccgtcgattttctgtgatgcgtcttgtactaactatactgttccattcggagccgacaaaactatgacggccgtcctctccggaactgccgacatcggctttatgggttcggaagcttctatctacacatataacgagggggcgaatgattatgttgtaaactttgcccagctcacccagcgcgccgggaacttcctggttgccagggaagatatta

SEQ ID NO: 33909 - DNA, 109 bp, Unknown
  Description of Unknown: RightRegion for integrase B7910 sequence
attatccgggagattcagctgaatactgatcatactgtcgactctgttgatttcttatagtgtcttgtactaactggttgactccgtttggggcggataaagttatgac

SEQ ID NO: 33910 - DNA, 260 bp, Unknown
  Description of Unknown: RightRegion for integrase B7911 sequence
attatccgggagattcacctgaacactgatcatactgtcgactctgttgatttcttatagcgtcttgtactaactggttgactccgtttggggtagattagttagtacaagacgttatttattatttcacccgtaatctctgtcctgtgtaaattaaattcgggttgaatagcttctcaactatccgtttatctaaactgaatagcttcaattcttaatgcctgaccaactgtaccaagtgtagaaacaccatcagcttt

SEQ ID NO: 33911 - DNA, 260 bp, Unknown
  Description of Unknown: RightRegion for integrase B7912 sequence
tcgtttgttgaatcggtgctggtgtatgaggatggaagcatggacattcgttttttgtagcctttgttgtactaactatgcaccgcctgtcggctcatctgcaaggatcagcttgggctgcgtgatcagcgctcttgccactgccgccctttgtttctgaccgccggatacttcatatggaaacttcttcaaaagttgagtgattccaagctgctgtgcaattggtttgagtttctgactcatctccggatactttttgc

SEQ ID NO: 33912 - DNA, 260 bp, Unknown
  Description of Unknown: RightRegion for integrase B7913 sequence
attatccgagagattcacctgaatcctgatcatactgttgactctgttgatttcttatagcgtcttgtactaactggttaactccatttggggcggataaagttatgaccgccgtcctctccggtgaggcagatattggctttatgggaagtgaatcttcgatttatacttaccaggagggtgcaaatgatgtcatcaaaaacttcgcacagcttacgcaacgcgccggaaactttctggtcgcacgtgaagaaatgccg

SEQ ID NO: 33913 - DNA, 109 bp, Unknown
  Description of Unknown: RightRegion for integrase B7914 sequence
attatccgggagattcagctgaatactgatcataccatcgactctgttgatttcttatagcgtcttgtactaactggttgactccgtttggggcggataaagttatgac

SEQ ID NO: 33914 - DNA, 260 bp, Unknown
  Description of Unknown: RightRegion for integrase B7915 sequence
tctttcgtccagtccataacccttcacgaagacggtaaaatggacattgtttttttatgatgtccgttttactaagtccgcattgcccgtcggctcgtcggccagcacaatagccggtttggtaatcagagcgcgtgcgatagccacacgctgctgctgtccgccggaaagattgttcggcatgtttttcagtttatcttccagccccagtagatgaacgatctcgtccaaaaacttctgatccaccgtgtccccgtcca

SEQ ID NO: 33915 - DNA, 260 bp, Unknown
  Description of Unknown: RightRegion for integrase B7916 sequence
tcaatcatccgtgaaatccgtgttgaccatgagaaaaatattcagattatttttttgtgattgtttatactactatcttacaccctccggttggctcgtccgccagaacgatagcaggctttgataccagagcgcgggcgatggctacacgctgctgctgaccgccggagagattgctgggcatattgttcagcttatcctccagccccagcatccgcaccacttctttcataaaccttttgtctaccttatttccgtcc

SEQ ID NO: 33916 - DNA, 260 bp, Unknown
  Description of Unknown: RightRegion for integrase B7917 sequence
tcgtttgttgaatcggtgctggtgtatgaggacggaagcatggacattcattttttataatttttgtcgtactaactctgcattgcctgtcggctcatcagccaaaattaattcaggatttgttattatcgcgcgtgccactgctgccctttgtttctgtccgcctgacacctcatatggatatttattaagcagcttttcaattccaagcagtgaagctataggtgcaagccttttttccatatccctatagtccacac

SEQ ID NO: 33917 - DNA, 260 bp, Unknown
  Description of Unknown: RightRegion for integrase B7918 sequence
gaaatccgtgtatcaaagagcattgggcggaaccggaaatatcaaatcatctttttgtaattgttttaccgttaagttaagtttccggtatgctgattcatccctgtcatttcattaaatacggtactctttcccacattcgggttgccggccagggcgatcaccttatcgtcttcctggcgcttcctgatttccagcccgcagtctacggacttgattccgacagaatctctgcttaaccccatattacgtcctccgtt

SEQ ID NO: 33918 - DNA, 260 bp, Unknown
  Description of Unknown: RightRegion for integrase B7919 sequence
tcgtttgttgaatcggtgctggtgtatgaggatggaagcatggacattcgttttttgtagtctttgtcgtactaactatgcaccgcctgtcggtactgctttgttagtacaatcaatatattgtggttatccacacagttatcctctatatgtggacaaaataaaagcaaggcggcgcattgtccgtcttgcttctcttttactccaaaattatcgacattattcttcgatgtattcaaccagcttcggatcgccgctga

SEQ ID NO: 33919 - DNA, 260 bp, Unknown
  Description of Unknown: RightRegion for integrase B7920 sequence
attatccgggagattcacctgaatactgatcataccgttgactctgttgatttcttatagcgtcttgtactaactggttgactccgtttggagtagtttagttagtacaagacaatatttattattttactcgtaacttctgtcctacatagatcacattcggattgctgattccattcaactgcgcaaccttctggtaagacgtgccgtatttagctgcaataccggaaagcgtatctccagactggacagtgtaatac

SEQ ID NO: 33920 - DNA, 260 bp, Unknown
  Description of Unknown: RightRegion for integrase B7921 sequence
tcgtttgttgaatcggtgctggtgtatgaggacggaagcatggacattcattttttataatttttgtcgtactaactctgcattgcctgtcggttcatctgccagaatgatagcgggtgctgctgccaaagcacgggcgattgccacacgctgctgctgaccgcctgagagctgatttggcagcgcatccaagcggtcgctcagtccaagtgtctgcacgatctgctgcacaaaattcttgtttatctttccaccatcca

SEQ ID NO: 33921 - DNA, 260 bp, Unknown
  Description of Unknown: RightRegion for integrase B7922 sequence
tccattgtcaaggaaatccgtgttgaccatgacaaaaacattcatattatttttttgtgattgttatactactaactgaacccctccggttggctcatcggccagcacaatagccggtttggtaatcagagcgcgggcaatcgccacacgctgctgctgtccgccggatagattgttcggcatatttttcagtttatcttccagccccagtaggtgaacaatttcgtccaaaaacttctgatccaccgtgtccccgtcca

SEQ ID NO: 33922 - DNA, 260 bp, Unknown
  Description of Unknown: RightRegion for integrase B7923 sequence
tccattgtcaaggaaatccgtgttgaccatgacaaaaacattcatattatttttttgtgattgttatactactaaccgaacccctccggtcggctcatcagcaagtatcagatcaggattattgattaacgcacgacatatggcaactctctgtttttcaccaccggataattcataaggttttttctttaacagatgttctatctgaaattgttctgcatatttctttgcttctgcaatcatcttattaatattctgtt

SEQ ID NO: 33923 - DNA, 260 bp, Unknown
  Description of Unknown: RightRegion for integrase B7924 sequence
tctttcgttgaatctatcactgtctatgaggacggcagtatggacattaattttttatgattttttatttatactaactatacctaaccgtttggcaaggataatactaaaccacaaaaatagccgccctggtctggtaaactaagcggcaatttttgtcaaaacatatatcggactaaccgtctatcgatagcactctttttctataatcatattagcacgcatgtgcagaaacgtcaaaaaatttttattctactttt

SEQ ID NO: 33924 - DNA, 178 bp, Unknown
  Description of Unknown: RightRegion for integrase B7925 sequence
attatccgggagattcacctgaatgctgatcataccgtcgactctgttgattttctatagcgtcttgtactaactggttgactccgtttggggcggataaagttatgaccgccgtcctctccggtgaggcagatattggctttatgggaagtgaatcttcgatttatacttaccagga

SEQ ID NO: 33925 - DNA, 260 bp, Unknown
  Description of Unknown: RightRegion for integrase B7926 sequence
attatccgggagattcacctgaatactgatcataccgttgactctgttgatttcttatagcgtcttgtactaactggttgactccgtttggggcggataaagttatgaccgccgtcctctccggtgaggcagatattggctttatgggaagtgaatcttcgatttatacttaccaggagggtgcaaatgatgtcatcaaaaacttcgcacagcttacgcagcgcgccggaaactttctggtcgcacgtgaagaaatgccg

SEQ ID NO: 33926 - DNA, 109 bp, Unknown
  Description of Unknown: RightRegion for integrase B7927 sequence
acgatcaagcagatccacctgaatgaagactctacgatcaagtttgttgattttttgtagtgcgtctctgcccgggaggcgcgctccaaagccagtaatcagcgtcagg

SEQ ID NO: 33927 - DNA, 115 bp, Unknown
  Description of Unknown: RightRegion for integrase B7928 sequence
tcgtttgttgaatcggtgctggtgtatgaggacggaagcatggacattcgttttttgtagtctttgtcgtactaactatgcaccgcctgttggctcatcagccaaaattaattcg

SEQ ID NO: 33928 - DNA, 260 bp, Unknown
  Description of Unknown: RightRegion for integrase B7929 sequence
attatccgggagattcacctgaatactgatcataccgttgactctgttgatttcttatagcgtcttgtactaactggttgactccgtttggggcggataaagttatgaccgccgtcctctccggtgaggcagatattggctttatgggaagtgaatcttcgatttatacttatcaggagggtgcaaatgatgtcatcaaaaacttcgcgcagcttacgcagcgcgccggaaactttctggtcgcacgtgaagaaatgccg

SEQ ID NO: 33929 - DNA, 260 bp, Unknown
  Description of Unknown: RightRegion for integrase B7930 sequence
tccattgtcaaggaaatccgtgttgaccatgacaaaaacattcatattatttttttgtgattgttatactactaactgaacccctccggtcggttcatcagccaggacgattgcaggctttgacaccaaagcgcgggcaatggctacgcgctgctgctggccgccggaaaggttattgggcatattgttcagcttatcctccagccccagcatctgaacgacttctttcataaacttcttgtctaccttgtttccgtcca

SEQ ID NO: 33930 - DNA, 109 bp, Unknown; identical to SEQ ID NO: 33839
  Description of Unknown: RightRegion for integrase B7931 sequence

SEQ ID NO: 33931 - DNA, 260 bp, Unknown
  Description of Unknown: RightRegion for integrase B7932 sequence
tcgtttgttgaatcggtgctggtgtatgaggacggaagcatggacattcattttttataatttttgtcgtactaactctgcattgcctgtcggctcatcggcaagcaccagacttggacttgttataattgcccttgcagaagcaactctctgtttctgtccacctgacatctggtaaggatatttatttaatatctctgttatatcaagctgttctgctacattttttactgccctgtcaattatctcaggagaatcat

SEQ ID NO: 33932 - DNA, 260 bp, Unknown
  Description of Unknown: RightRegion for integrase B7933 sequence
tccattgtcaaggaaatccgtgttgaccatgacaaaaacattcatattatttttttatgattgttatactactaactgaacccctccggtaggctcatctgccagtacaactgcaggttttgtcattaatgccctggcgatcgccactctctgctgctgtcctccggaaagcgttccgggcagccgctccagttgattctgaattcccaacagcatcacgatttcctcaaagagttcctgattgatccctgttccatcca

SEQ ID NO: 33933 - DNA, 260 bp, Unknown
  Description of Unknown: RightRegion for integrase B7934 sequence
attatccgggagattcacctgaacactgatcatactgtcgactctgttgatttcttatagcgtcttgtactaacttgttgactccgtttggggcggataaagttatgaccgccgtcctctccggtgaggcagatattggctttatgggaagtgaatcttcgatttatacttaccaggagggtgcaaatgatgtcatcaaaaacttcgcgcagcttacgcagcgcgccggaaactttctggtcgcacgtgaagaaatgccg

SEQ ID NO: 33934 - DNA, 260 bp, Unknown
  Description of Unknown: RightRegion for integrase B7935 sequence
tcgtttgttgaatcagtgctggtgtatgaggatggaagcatggacattcgttttttgtagtctttgtcatactaactatgcaccgcctgtcggtactgctttgttagtacaatcaatatattgtggttatccacacagttatcctctatatgtggacaaaataaaagcaaggcggcgcattgtccgtcttgcttctcttttactccaaaattatcgacattattcttcgatgtattcaaccagcttcggatcgccgctga

SEQ ID NO: 33935 - DNA, 260 bp, Unknown
  Description of Unknown: RightRegion for integrase B7936 sequence
atcattcaggaaatccatataaatgaagacagtaccataacctccgtcgattttctgtgatgcgtcttgtactaactatactgttccattcggagccgacaaaactatgacggccgtcctctccggaactgccgacatcggctttatgggttcggaagcttctatctacacatataacgagggggcgaatgattatgttgtaaactttgcccagctcacccagcgcgccgggaacttcctggttgccagggaagatatta

SEQ ID NO: 33936 - DNA, 260 bp, Unknown
  Description of Unknown: RightRegion for integrase B7937 sequence
tccattgtcaaggaaatccgtgttgaccatgacaaaaacattcatattatttttttgtgattgttatactactaactgaacccctccggtcggttcatctgcaagtataatagctggtttggaaacaagggcgcgggcaatcgctacacgctgctgctggccgccggacagattgttaggcatactgttcagcttcccatcgagagccaacattttcacgacttcatccataaaccgcttgtccacggtatcaccatcca

SEQ ID NO: 33937 - DNA, 260 bp, Unknown
  Description of Unknown: RightRegion for integrase B7938 sequence
tccattgtcaaggaaatccgtgttgaccatgacaaaaacattcatattatttttttgtgattgttatactactaactgaacccctccggtcggctcatctgcaagaataaatgccggctcgtttataagcgcccttcctatggatactctttgctgctgacctccagacatttgtcccggcagatgttttgcccttttctcaagacccagcatattgacaatctcagaaagccgttccttattctcttttcttccatcta

SEQ ID NO: 33938 - DNA, 109 bp, Unknown
  Description of Unknown: RightRegion for integrase B7939 sequence
tttaacaaaaataagactctcaacacagttaaaatcaatgagatacagtttaaattttgatgaatggtgtgttacgcggtagaccgcacacgttcccccaatataactt

SEQ ID NO: 33939 - DNA, 260 bp, Unknown; identical to SEQ ID NO: 33831
  Description of Unknown: RightRegion for integrase B7940 sequence

SEQ ID NO: 33940 - DNA, 260 bp, Unknown
  Description of Unknown: RightRegion for integrase B7941 sequence
tccattgtcaaggaaatccgtgttgaccatggcaaaaacattcatattatttttttgtgattgttatactactaactgaacccctccggtcggctcatctgccagaagaagtgtgggataatttgcaagtgcacgggcacatgcacaccgctgcttttgtccgccggacacctgatacggatacttatccttaacctcctcgattcccagaatgcgaagcagctccctgcaccgtttctgaatctcctttttgccacgcc

SEQ ID NO: 33941 - DNA, 109 bp, Unknown; identical to SEQ ID NO: 33871
  Description of Unknown: RightRegion for integrase B7942 sequence

SEQ ID NO: 33942 - DNA, 143 bp, Unknown
  Description of Unknown: RightRegion for integrase B7943 sequence
tcttttattgaatctatccttgtgcacgaagatggaagcatggatatttcttttttgtagctttgtttttactaactacgcaccgcccgtcggctcatctgcaaatataatttccggacgattcaccagtgctcttgcaattg

SEQ ID NO: 33943 - DNA, 260 bp, Unknown
  Description of Unknown: RightRegion for integrase B7944 sequence
attatccgggagattcacctgaacactgatcatactgtcgactctgttgatttcttatagcgtcttgtactaactggttgactccgtttggggcggataaagttatgaccgccgtcctctccggtgaggcagatattggctttatgggaagtgaatcttcgatttatacttaccaggaaggtgcaaatgatgtcatcaaaaacttcgcgcagcttacgcagcgcgccggaaactttctggtcgcacgtgaagaaatgccg

SEQ ID NO: 33944 - DNA, 260 bp, Unknown
  Description of Unknown: RightRegion for integrase B7945 sequence
atcattcaggagattcatgtaaatgaagaccatgccataacctccgtcgattttctgtgatatgtcttgtactaactatactgttccatttggcgccgacaagaccatgactgctgtcctttccggaacagccgatatcggatttatgggatcagaagcttccatttatacttataatgaaggggctcgtgattatgtcgtgaattttgcacagctcactcagcgagccggaaacttcctagttgcaagagaggatatta

SEQ ID NO: 33945 - DNA, 260 bp, Unknown
  Description of Unknown: RightRegion for integrase B7946 sequence
tctttcgttaaatccgttactgtctatgaagacggaagtatggacattaattttctatgattttttatttatactaactatacttaaccgtttggttacaaatagttagtataaatatcttttttgtgcaatttgtcttttgtgtggctccgatccggctctgatccatgcacttccgtaggcataatgcacaaaaggcagcgatcttttgaccgctgccctctttttttactcttcgatttccacttctgtgatctgtg

SEQ ID NO: 33946 - DNA, 109 bp, Unknown
  Description of Unknown: RightRegion for integrase B7947 sequence
attatccgggagattcacctgaacactgatcatactgtcgactctgttgatttcttatagcgtcttgtactaacttgttgactccgtttggggcggataaagttatgac

SEQ ID NO: 33947 - DNA, 260 bp, Unknown
  Description of Unknown: RightRegion for integrase B7948 sequence
tcgtttgttgaatcggtgctggtgtatgaggatggaagcatggacattcgttttttgtagtctttgtcgtactaactatgtaccgcctgtgggctcatctgccagaataatctgagggttagtaataagagctctcgcaaccgctgccctctgcttctgtccacctgacacctcatatgggaactttcctaatatagactcaattcccagctcctttgcaattggcttaagcttctcttgcatgctatcatacttctccc

SEQ ID NO: 33948 - DNA, 260 bp, Unknown
  Description of Unknown: RightRegion for integrase B7949 sequence
tctttcgtgcagtccattactgttcacgaggacggagaaatggatattgtttttttataatcttgtttctactaactacgcactacccgtcggttcgtccgccagaatgatcttcggttctgtgatcagtgcccttgcgatcgctgcacgctgtttctgaccgccggacacttcatacggatatttctccagaagcttttcaatggacagtctgcgtgaaagttccatcattttcggtgccatttcactgtaagtttttc

SEQ ID NO: 33949 - DNA, 260 bp, Unknown
  Description of Unknown: RightRegion for integrase B7950 sequence
tccttcgtgcagtcaatcactgttcacgaggacggagaaatggatattgtttttttatgatcttgtttctactaactatgcaccgcctgtcggtactgcgtagttagtaaaaacgattcttttgtgcagttttgcttttctctggctccgatcagggcgagatctggacttcgtaaaaggcaaattgcacaaaaagagggccgaacagggaactgctccctgcccggtcctcttttactttctcatcttatttcttcaga

SEQ ID NO: 33950 - DNA, 260 bp, Unknown; identical to SEQ ID NO: 33868
  Description of Unknown: RightRegion for integrase B7951 sequence

SEQ ID NO: 33951 - DNA, 260 bp, Unknown
  Description of Unknown: RightRegion for integrase B7952 sequence
gaaatccgtgtatcaaagagcattgggcggaaccggaaatatcaaatcatctttttgtaattgttttaccgttaagttaagtttccggtatgctgattcattccagtcatttcattaaataccgtactcttccccacattcgggttacctgccagcgcgatgaccttatcatcttcccggcgttttttgatttcaagtccgcagtccacagacttgatccccacagaatctctgcttaaccccatattacgtcctccgtt

SEQ ID NO: 33952 - DNA, 260 bp, Unknown
  Description of Unknown: RightRegion for integrase B7953 sequence
tcgtttgttgaatcggtgctggtgtatgaggatggaagcatggacattcgttttttgtagtctttgtcgtactaactatgcaccgcctgttggttcgtccgccaaaattaaatcgggattgtagattaatgcgcggcaaatcgcagttctttgtttttctcctcctgataattcatatggttttttatccaataaatccgcaattgcaaacttctcagccatttcttcacattttttcttactctcctgaacatctgcct

SEQ ID NO: 33953 - DNA, 109 bp, Unknown
  Description of Unknown: RightRegion for integrase B7954 sequence
acaatcaaggagatacatctcaacgacgattacactgtaaaagaggttgattttttgtgatttgtcttgtactaattatatcattccatttggagccgataaatcaatg

SEQ ID NO: 33954 - DNA, 260 bp, Unknown
  Description of Unknown: RightRegion for integrase B7955 sequence
tcgtttgttgaatcagtgctggtgtatgaggatggaagcatggacattcgttttttgtagtctttgtcgtactaactatgcaccgcctgtcggctcatccgctaagatgatcgccggatcattgatcattgcgcgcgcgatcgccacacgctgtttctgtccaccggaaagctcgtttggtttatggaaagcacgttcctccatgccaaccatttttaacatttccatggctcgctctttttgatttttttccctctcag

SEQ ID NO: 33955 - DNA, 109 bp, Unknown
  Description of Unknown: RightRegion for integrase B7956 sequence
aaaaataataatagtaacacaaatactgttaatataaagaaagtacattttatattttaatgtgggttatgtaaccatagccgttgcaccggttcctcccatagttgct

SEQ ID NO: 33956 - DNA, 260 bp, Unknown
  Description of Unknown: RightRegion for integrase B7957 sequence
atcattcaggaaatccatataaatgaagacagtaccataacctccgtcgattttctgtgatgcgtcttgtactaactacactgttccattcggagccgacaaaactatgacggccgtcctctccggaactgccgacatcggctttatgggttcggaagcttctatctacacatataacgagggggcgaatgattatgttgtaaactttgcccagctcacccagcgcgccgggaacttcctggttgccagggaagatatta

SEQ ID NO: 33957 - DNA, 109 bp, Unknown
  Description of Unknown: RightRegion for integrase B7958 sequence
atcattcaggagattcacgtgaatgaagacaacgccataacctctgtcgattttctatgatgcgtcttgtactaactatactgttccattcggagccgacaaaactatg

SEQ ID NO: 33958 - DNA, 109 bp, Unknown
  Description of Unknown: RightRegion for integrase B7959 sequence
attatccgggagattcacctgaatgctgatcatactgtcgactctgttgatttcttatagcgtcttgtactaactggttgactccgtttggggcggataaagttatgac

SEQ ID NO: 33959 - DNA, 260 bp, Unknown
  Description of Unknown: RightRegion for integrase B7960 sequence
tcgtttgttgaatcggtgctggtgtatgaggacggaagcatggacattcattttttataatttttgtcgtactaactctgcattgcctgttggctcatcagccaaaattaattcaggatttgttattatcgcgcgtgccactgctgccctttgtttctgtccgcctgacacctcatatggatatttattaagcagcttttcaattccaagcagtgaagctataggtgcaagccttttttccatatccctatagtccacac

SEQ ID NO: 33960 - DNA, 109 bp, Unknown; identical to SEQ ID NO: 33860
  Description of Unknown: RightRegion for integrase B7961 sequence

SEQ ID NO: 33961 - DNA, 109 bp, Unknown; identical to SEQ ID NO: 33897
  Description of Unknown: RightRegion for integrase B7962 sequence

SEQ ID NO: 33962 - DNA, 260 bp, Unknown
  Description of Unknown: RightRegion for integrase B7963 sequence
tcttttattgacaaaattgtaattgatgtgaacggtaatatagatattatttttttgtaatttaattggtactaacacacccgcacccgtaggtaattctaatgcaactgtctttttatccatatttttaatatacaaatttaacatagctgcttgataatctaaaggtcccatgatctttttcaatttattatcttgatacatttcttgtggtgaggaatataaaaattcttctttctttcgtgttttaaatgccataa

SEQ ID NO: 33963 - DNA, 260 bp, Unknown
  Description of Unknown: RightRegion for integrase B7964 sequence
tctttcgttgaatctatcactgtctatgaggacggcagtatggacattaattttttatgattttttatttatactaactatacctaaccgttcggcaaggataataataagacacaaaaataaccgccctgtctgcaaaactaagcggttacttttgtaatcaataaatatgtggactaaccgtctatcggtagcacccctttttataatcatattagcacgcatctgtgaaaatgtcaaaaattttattcgttctcttg

SEQ ID NO: 33964 - DNA, 109 bp, Unknown; identical to SEQ ID NO: 33839
  Description of Unknown: RightRegion for integrase B7965 sequence

SEQ ID NO: 33965 - DNA, 260 bp, Unknown
  Description of Unknown: RightRegion for integrase B7966 sequence
tcgtttgttgaatcggtgctagtgtatgaggatggaagcatggacattcgttttttgtagtctttgtcgtactaactatgcaccgcctgtaggttcatcagcaagaatcagctttggattagtgataatcgctctagcacttgcaactctctgcttctgtccacctgacatctgatacggatatttatttaacacttcataaattccaagttcatttgcaacttttttcacacgtctgtcaatttcaccggcttttacat

SEQ ID NO: 33966 - DNA, 260 bp, Unknown
  Description of Unknown: RightRegion for integrase B7967 sequence
atcaaaaatatcatagttgacggcagcagaatcacagtaaatttacggctcaaaaaataattcaacctaaaaaaagaggcttttttataataaaaacctcttttttttcttgacaaatatatttaacggctctaaaatagaggtgaagctcagaaaaattgaatagtccattggcgcaataatgaagtaacgctatactgtcaggcgcagggacaaaaggattatcccattatattcggacagctgaccaaaaaggacgg

SEQ ID NO: 33967 - DNA, 260 bp, Unknown
  Description of Unknown: RightRegion for integrase B7968 sequence
tctatcattcgtgagatccgcgtggatcatgagagaaatgtccgtattatttttttgtgatttttatactactaacttacaccgtccggttggttcatctgcaagaataattgcaggtttcgttgctaaagctcgaataatcgctacacgctgttgttcgccaccagatagcattgaggggagcatttcctgtttatttgagatatttaatatattgagcagttcttgaatgaactctttatcaatttgtgcaccatcta

SEQ ID NO: 33968 - DNA, 260 bp, Unknown; identical to SEQ ID NO: 33831
  Description of Unknown: RightRegion for integrase B7969 sequence

SEQ ID NO: 33969 - DNA, 260 bp, Unknown
  Description of Unknown: RightRegion for integrase B7970 sequence
gaaatccgtatatcaaagagtgttgggcggaacaggaaataccagattatttttttgtaattgttttaccgttaagttaatcagcctgtgtgctgattcatccctgtcatttcattaaatacggtactctttcccacattcgggttgccggccagggcgatcaccttatcgtcttcctggcgcttcctgatttccagcccgcagtctacggacttgattccgacagaatctctgcttaaccccatattacgtcctccgtt

SEQ ID NO: 33970 - DNA, 260 bp, Unknown
  Description of Unknown: RightRegion for integrase B7971 sequence
aaaaacaataatagtaacacaaatactgttaatataaggaaagtacattttatattttaatgtgtgttatgtaactatagccgtggcgcttgttacataacgcacatataaaaaccacgcccataaagaacgtggtttagaatatagtattagtttgaaatcaggaacaaagattattatacaattaaaaaatagggtagccaaagagactacccttgtataatgacgtggtaatttaattataacagattaattaattg

SEQ ID NO: 33971 - DNA, 260 bp, Unknown
  Description of Unknown: RightRegion for integrase B7972 sequence
tcgtttgttgaatcggtgctggtgtatgaggatggaagcatggacattcattttttatgatcatcttcgtactaactttgcaccgcctgtcggctcatctgcaaatataatttccggacgattcaccagtgctcttgcaattgctactctctgctgctgtcctccggataactgatttggcagattataaatccggttttcaatccccagagttgcaataatatcatttacatacgcttcatccacttttcttccatcca

SEQ ID NO: 33972 - DNA, 260 bp, Unknown
  Description of Unknown: RightRegion for integrase B7973 sequence
attatagattcgatagaattcataaatgactatagattctatattcatttaaaattctagctggaggttgcaatgtctatcttaaaagaaaaagtaataaataaatattctttaaatcagttaaaagaaatactgccacaaaaaatactctattactttatgaataataaaactttagcaattccacctctttacacaatttcacagtacatagatttagattatattaattataccccttcagatttaaaaaaagatta

SEQ ID NO: 33973 - DNA, 260 bp, Unknown
  Description of Unknown: RightRegion for integrase B7974 sequence
tccattgtcaaggaaatccgtgttgaccatgacaaaaacattcatattatttttttgtgattgttatactactaactgaacccctccggtaggttcatctgccaaaacaacagaacattttttcatcataagacgagctaaagcaactctctgttgttcaccaccggaaagctgataaacttttttgttaacttcctttgataaccccacacgattaagagcttctttaagtgatactttagttcggcttgattttttaa

SEQ ID NO: 33974 - DNA, 260 bp, Unknown
  Description of Unknown: RightRegion for integrase B7975 sequence
ctaattgatcatattgatatagacggcgaaaacgtcgtaatacactgggtttttgagtaatctcttttttattcttttcgagtgcgaatagtgacacttctcctgaaagacgttactattcgcaataaaaaagacacgttcaaaacgtgccctagttgatcaaatttactttcttcttaaattcccgtacaacttcctcaaccgtcaacccctggagtcgatcctgcgtttgctggataatgccattcacaaccccattc

SEQ ID NO: 33975 - DNA, 109 bp, Unknown
  Description of Unknown: RightRegion for integrase B7976 sequence
atcattcaggagattcatgtgaacgaagaccatgccataacctccgtcgattttctgtgatgtgtcttgtactaactatactgttccattcggagccgacaaaactatg

SEQ ID NO: 33976 - DNA, 260 bp, Unknown
  Description of Unknown: RightRegion for integrase B7977 sequence
attatccgagagattcacctgaatcctgatcatactgttgactctgttgatttcttatagcgtcttgtactaactggttaactccatttggggcggataaagttatgaccgccgtcctctccggtgaggcagatattggctttatgggaagtgaatcttcgatttatacttaccaggagggtgcaaatgatgtcatcaaaaacttcgcgcagcttacgcagcgcgccggaaactttctggtcgcacgtgaagaaatgccg

SEQ ID NO: 33977 - DNA, 140 bp, Unknown
  Description of Unknown: RightRegion for integrase B7978 sequence
tcaatcattcgtgaaatccgtgttgaccatgagaaaaatattcagattatttttttatgattgttatactactaactgcacccctccgacaggggcattagacagccattcctcacaaatgttgctgtctaccattcaaa

SEQ ID NO: 33978 - DNA, 260 bp, Unknown
  Description of Unknown: RightRegion for integrase B7979 sequence
attatccgggagattcacctgaacactgatcatactgtcgactctgttgatttcttatagcgtcttgtactaactgattgactccgtttggggcggataaagttatgaccgccgtcctctccggtgaggcagatattggctttatgggaagtgaatcttcgatttatacttaccaggaaggtgcaaatgatgtcatcaaaaacttcgcgcagcttacgcagcgcgccggaaactttctggtcgcacgtgaagaaatgccg

SEQ ID NO: 33979 - DNA, 260 bp, Unknown
  Description of Unknown: RightRegion for integrase B7980 sequence
attgaatccatccgcataaacggcgaccaaatcgccatccactggcgcattggctcatgacaaaattgtacggtctatgcacatggtatttttaattttgtatcaggagataccaaagcggagaacgaaaacccgccccggaaagcgaaattttttcaaaaaagccttgacaatatcactataaaatggtataatgtaagtacagtcaagggcaaccgaggcgagtaaggcggcaagtgccggaaaggagaagcacatgg

SEQ ID NO: 33980 - DNA, 260 bp, Unknown
  Description of Unknown: RightRegion for integrase B7981 sequence
attatccgggagattcacctgaacactgatcatactgtcgactctgttgatttcttatagcgtcttgtactaactggttgactccgtttgggcggataaagttatgaccgccgtcctctccggtgaggcagatattggctttatgggaagtgaatcttcgatttatacttaccaggagggtgcaaatgatgtcatcaaaaacttcgcgcagcttacgcagcgcgccggaaactttctggtcgcacgtgaagaaatgccgg

SEQ ID NO: 33981 - DNA, 260 bp, Unknown
  Description of Unknown: RightRegion for integrase B7982 sequence
attatccgggagattcacctgaacactgatcatactgtcgactctgttgatttcttatagcgtcttgtactaactggttgactccgtttggggcggataaagttatgaccgccgtcctctccggtgaggcagatattggctttatgggaagtgaatcttcgatttatacttaccaggagggtgcaaatgatgtcatcaaaaacttcgcacagcttacgcaacgcgccggaaactttctggtcgcacgtgaagaaatgccg

SEQ ID NO: 33982 - DNA, 260 bp, Unknown
  Description of Unknown: RightRegion for integrase B7983 sequence
attatccggaagattcacctgaacactgatcatactgtcgactctgttgatttcttatagcgtcttgtactaactggttgactccgtttggggcggataaagttatgaccgccgtcctctccggtgaggcagatattggctttatgggaagtgaatcttcgatttatacttaccaggagggtgcaaatgatgtcatcaaaaacttcgcgcagcttacgcagcgcgccggaaactttctggtcgcacgtgaagaaatgccg

SEQ ID NO: 33983 - DNA, 109 bp, Unknown; identical to SEQ ID NO: 33860
  Description of Unknown: RightRegion for integrase B7984 sequence

SEQ ID NO: 33984 - DNA, 260 bp, Unknown
  Description of Unknown: RightRegion for integrase B7985 sequence
ataatagattcgattgaattcgtaaatgactatagattttatattcatttaaaattctaactggaggtaataatgacttctatcttaaaaaacaaggttaataaaaaatattctataggtaatttagaaaaaatattacctgaaaaagcttttttctattttgcaagcgatgaatctttagaaattccagcactttataatatttcaaattatatcgatttgaattatattaaatacactgttaaagattttaaaaaaga

SEQ ID NO: 33985 - DNA, 260 bp, Unknown
  Description of Unknown: RightRegion for integrase B7986 sequence
tccattgtcaaggaaatccgtgttgaccatgacaaaaacattcatattatttttttgtgattgttatactactaactgaacccctccggtcggctcatccgcaaatataatttccggacgattcaccagtgctcttgcaatcgctactctctgctgctgtcctccggataactgatttggcagattgtaaatcctcttttcaatccccagagttgcaataatatcatttacatacgcttcatccacttttcttccatcca

SEQ ID NO: 33986 - DNA, 260 bp, Unknown
  Description of Unknown: RightRegion for integrase B7987 sequence
tccgtgatccgggagatacgcatagaccatgataaaaatattgagattgttttcctgtaatataaaaagctgccaaaaggcagctttttgattttctgtcaaatcttattttaaagcaatttcctgttcctgataaatatcatcaaacaaattctctgatgactgatcttctacgtgcaaagtgacagggctttcgctgtcctgtaaagtatataggaacgctacgttcaaagtggtccctttctggatctcttttatag

SEQ ID NO: 33987 - DNA, 260 bp, Unknown
  Description of Unknown: RightRegion for integrase B7988 sequence
tcgtttgttgaatcggtgctggtgtatgaggatggaagcatggacattcgttttttgtagtctttgtcgtactaactatgcaccgcctgttggctcatctgccaaaataatatcggggtcggaaatcaaactgcgggcggcagcgacgcgctgtttttgaccacctgacatctgcgccggaaatttggagagcacatccgtgattccaaaaagtcctgcaatgtcattcaacttcttctccgcagcagatatatctacat

SEQ ID NO: 33988 - DNA, 260 bp, Unknown
  Description of Unknown: RightRegion for integrase B7989 sequence
acgatccggcagatctatttaaaatcagattatacgattgactatgttgattttatttaatctgtctgcgcctaaattgtcatccccgtttggagccgataaaacaatgactgccgttatttccggagaagccgatattggatttatgggatctgaagcttccgtttatatgtacagcgaaggagcttccgactatgtcgttaattttgcacagctcacacagcgagccggaaactttctcgttgcacggcaagacaacg

SEQ ID NO: 33989 - DNA, 142 bp, Unknown
  Description of Unknown: RightRegion for integrase B7990 sequence
tcgtttgttgaatcggtgctggtgtatgaggatggaagcatggacattcgttttttgtagtctttgtcgtactaactatgcaccgcctgtcggttcatcagctaaaatcagtttcggttcattgattaaggctctagcacaa

SEQ ID NO: 33990 - DNA, 260 bp, Unknown
  Description of Unknown: RightRegion for integrase B7991 sequence
attatagattcgatagaatttataaacgattatagattctatattcatttaaaattctagctggaggttgtaatgtctatcttaaaagaaaaagtaataaataaatattctttaaatcagttaaaagaaatactgccacaaaaaatactctattactttatgaataataaaactttagcaattccacctctttacacaatttcacagtacatagatttagattatattaattataccccttcagatttaaaaaaagatta

SEQ ID NO: 33991 - DNA, 260 bp, Unknown
  Description of Unknown: RightRegion for integrase B7992 sequence
attatccgggagattcacctgaatactgatcataccgttgactctgttgatttcttatagcgtcttgtactaactggttgactccgtttggggcggataaagttatgaccgccgtcctctctggcgaggcagatattggctttatgggaagtgaatcttcgatttatacttaccaggagggtgcaaatgatgtcatcaaaaacttcgcgcagcttacgcctgtctcttatacacatctgacgctgccgacgaattagacg

SEQ ID NO: 33992 - DNA, 260 bp, Unknown
  Description of Unknown: RightRegion for integrase B7993 sequence
gaaaaaagaggtaaagtgcatagaagtaatatttctatcactaatattattttcaaataataataacacactctattacttttacttgtataaaggaatttcccgacgtatgtgggtatatatggatatcactggctcttttttctattgcttcgttaataatttggttcattaattcttttacatcaatagttatcacccctttttctcaagaaaagaaaaatataggctaagtattaccacttagcctatatttaaaa

SEQ ID NO: 33993 - DNA, 160 bp, Unknown
  Description of Unknown: RightRegion for integrase B7994 sequence
tcttttattgaatctatccttgtgcacgaagatggaagcatggatatttcttttttgtagctttgtttttactaactacgcaccgcccgtcggctcatcacagagcagaatatccggattttttacaattgcacgcccaatcgcggttctctgctgctgt

SEQ ID NO: 33994 - DNA, 109 bp, Unknown; identical to SEQ ID NO: 33860
  Description of Unknown: RightRegion for integrase B7995 sequence

SEQ ID NO: 33995 - DNA, 260 bp, Unknown
  Description of Unknown: RightRegion for integrase B7996 sequence
tccattgtcaaggaaatccgtgttgaccatgacaaaaacattcatattatttttttgtgattgttatactactaactgaacccctccggtcggctcatctgcaaatataatttccggacgattcaccagtgctcttgcaattgctactctctgctgctgtcctccggataactgatttggcagattataaatccggttttcaatccccagagttgcaataatatcatttacatacgcttcatccacttttcttccatcca

SEQ ID NO: 33996 - DNA, 260 bp, Unknown
  Description of Unknown: RightRegion for integrase B7997 sequence
tctttcgttgaatctatcactgtctatgaggacggcagtatggacattaattttttatgattttttatttatactaactatacctaaccgtttggttacaaatagttagtataaatattattttgtgcaatttgcctttgatgtggctccgatccagctctgatccatgcacttccgaaggcataatgcacaaaaggcagcgatcttttgaccgctgccctctttttttactcttcgatttccacttctgtgatctgtgc

SEQ ID NO: 33997 - DNA, 260 bp, Unknown; identical to SEQ ID NO: 33832
  Description of Unknown: RightRegion for integrase B7998 sequence

SEQ ID NO: 33998 - DNA, 260 bp, Unknown
  Description of Unknown: RightRegion for integrase B7999 sequence
tccattgtcaaggaaatccgtgttgaccatgacaaaaacattcatattatttttttatgattgttatactactaactgaacccctccggtcggaagctcacgcaccttcttatctatccacttctgaagctcctcgtccttgatatactccttctcaacggacatggatggtgcgtacgatttcacattcgctgttccgctggactggtgaatataatgcttagtctcgttctcagggttaaactcctccgtgagtgagc

SEQ ID NO: 33999 - DNA, 260 bp, Unknown
  Description of Unknown: RightRegion for integrase B8000 sequence
tccattgtcaaggaaatccgtgttgaccatgacaaaaacattcatattatttttttgtgattgttatactactaactgaacccctccggttggttcatccgcaaggatcagagatggatttgagatcattgctctcgcacttgccactctctgcttctgccctccagacatctgatatggatatttgtttaacacctctgtgatcattaatttctctgcgatcgatcttactctgtcctcaatctcttttgccggaactt

SEQ ID NO: 34000 - DNA, 109 bp, Unknown
  Description of Unknown: RightRegion for integrase B8001 sequence
attatccgggagattcacctgaatactgatcataccgttgactctgttgatttcttatagcgtcttgtactaactagttgactccgtttggggcggataaagttatgac

SEQ ID NO: 34001 - DNA, 166 bp, Unknown
  Description of Unknown: RightRegion for integrase B8002 sequence
tctttcgttgaatctattatagtctatgaagacggcagcatggacattaattttttatgattttttatttatactaactatacttaaccatttggccatcctgcataaaatgcgacatgtgtgatcactgcggcaatctctttttgtgttacaccatgattttttg

SEQ ID NO: 34002 - DNA, 109 bp, Unknown; identical to SEQ ID NO: 33897
  Description of Unknown: RightRegion for integrase B8003 sequence

SEQ ID NO: 34003 - DNA, 109 bp, Unknown
  Description of Unknown: RightRegion for integrase B8004 sequence
atcattcaggaaatccatataaatgaagacagtaccataacctccgtcgattttctgtgatgcgtcttgtactaactatactgttccatttggagccgacaaaactatg

SEQ ID NO: 34004 - DNA, 109 bp, Unknown; identical to SEQ ID NO: 33860
  Description of Unknown: RightRegion for integrase B8005 sequence

SEQ ID NO: 34005 - DNA, 201 bp, Unknown
  Description of Unknown: RightRegion for integrase B8006 sequence
attatccgggagattcacctgaacactgatcatactgtcgactctgttgatttcttatagcgtcttgtactaactggttgactccgtttggggcggataaagttatgaccgccgtcctctccggtgaggcagatattggctttatgggaagtgaatcttcgatttatacttaccaggaaggtgcaaatgatgtcatcaaaa

SEQ ID NO: 34006 - DNA, 260 bp, Unknown
  Description of Unknown: RightRegion for integrase B8007 sequence
tctatcatccgggagatccgcgtggatcataataggaatgtccgtattatttttttgtgatttttatactactaacttacaccgtcctgtcggctcatctgcaagaataaatgccggctcgtttataagtgcccttcctatggatactctttgctgctgacctcctgacatttgacctggcagatgttttgcccttttctcaagacccagcatattcacaatctcagaaagccgttccttattctcttttcttccatcta

SEQ ID NO: 34007 - DNA, 109 bp, Unknown
  Description of Unknown: RightRegion for integrase B8008 sequence
atcattcaggagattcatgtgaatgaagaccatgccataatctccgtcgattttctgtgatgcgtcttttactaactatactgttccatttggcgccgacaagaccatg

SEQ ID NO: 34008 - DNA, 260 bp, Unknown; identical to SEQ ID NO: 33864
  Description of Unknown: RightRegion for integrase B8009 sequence

SEQ ID NO: 34009 - DNA, 154 bp, Unknown
  Description of Unknown: RightRegion for integrase B8010 sequence
tccattgtcaaggaaatccgtgttgaccatgacaaaaacattcatattatttttttatgattgttgtactactaacttaccccctccggtcggctcatccgcaaatataatttccggacgattcaccagtgctcttgcaattgctactctctgc

SEQ ID NO: 34010 - DNA, 260 bp, Unknown
  Description of Unknown: RightRegion for integrase B8011 sequence
attatccgggagattcacctgaatactgatcataccgttgactctgttgatttcttatagcgtcttgtactaactggttgactccgtttggggcggataaagttatgaccgccgtcctctccgatgaggcagatattggctttatgggaagttaatcttcgatttatacttaccaggagggtgcaaatgatgtcatcaaaaatttcgcgcagcttacgcagcgcgccggaaactttctggtcgcacgtgaagaaatgccg

SEQ ID NO: 34011 - DNA, 109 bp, Unknown
  Description of Unknown: RightRegion for integrase B8012 sequence
attatccgggagattcacctgaacactgatcatactattgactctgttgatttcttatagcgtcttgtactaactggttgactccgtttggagcggataaagttatgac

SEQ ID NO: 34012 - DNA, 260 bp, Unknown
  Description of Unknown: RightRegion for integrase B8013 sequence
ataatagattcaatcgaatttataaatgactatagattttatattcatttaaaattctaactggaggtaagcatgacttctattttaaaaaacaaagttaataaaaaatactctataggtaaattagaaaaattgttaaccaaaaaaatttttttatattttgctgataacaattcattggaaatacccccactttataatatttcatattctattgatattgactatattgaatacacagtcaaagactttaaaaaaga

SEQ ID NO: 34013 - DNA, 260 bp, Unknown; identical to SEQ ID NO: 33981
  Description of Unknown: RightRegion for integrase B8014 sequence

SEQ ID NO: 34014 - DNA, 260 bp, Unknown
  Description of Unknown: RightRegion for integrase B8015 sequence
tcgtttgttgaatcggtgctggtgtatgagggcggaagcatggacattcgttttttgtagtctttgtcgtactaactatgcaccgcctgtcggctcgtcagccagcacgatagccggtttggtaatcagagcgcgggcaatcgccacacgctgctgctgtccgccggatagattgttcggcatatttttcagtttatcttccagccccagtaggtgaacaatttcgtccaaaaacttctgatccaccgtgtccccgtcca

SEQ ID NO: 34015 - DNA, 260 bp, Unknown
  Description of Unknown: RightRegion for integrase B8016 sequence
aaaaataataatagtaacacaaatactgttaatataaagaaagtacactttatattttaatgtgtgttatgtaactatagccgtggtgcttgttacataacgcacatataaaaaccacgcccattaagaacgtggtagagaaaattataaagaagtaaaaaagattaaattgtatgtaatttaattataacacaaaagtaaccgtaccagttaagatatagttacttattcagacttatgagaggtggcctttaatatgt

SEQ ID NO: 34016 - DNA, 260 bp, Unknown
  Description of Unknown: RightRegion for integrase B8017 sequence
attatccgggagattcacctgaatactgatcataccgttgactctgttgatttcttatagcgtcttgtactaactggttgactccgtttggggtagtttagttagtacaagacaatatttattatttcacccgcagtatctgaccaacatagatcaaattagggttggatagcccattaagctgcgcaaccttctggtaggacgtgccgtatttagctgcaataccggaaagcgtatctccagactggacagtgtaatac

SEQ ID NO: 34017 - DNA, 260 bp, Unknown
  Description of Unknown: RightRegion for integrase B8018 sequence
tcgtttgttgaatcagtgctggtgtatgaggatggaagcatggacattcgttttttgtagtctttgtcgtactaactatgcactgcctgtaggctcatcagcaagaataagctttggattagtaataatggctcttgcacttgccactctctgcttctgtccgcctgacatctgataaggatatttgtttaatacatcttcaatgccaagctctcttgcagtctgtcttactcttaattcaatctcccttgccggaacat

SEQ ID NO: 34018 - DNA, 260 bp, Unknown
  Description of Unknown: RightRegion for integrase B8019 sequence
atccacccggacggaggagcggaattcctgttcaggaacggagcggtaataacggaataactgtaaaaaagcaaggcccggaaaggaaaaatccgggtcttttcttgcatctttattcacgaagagctgccgttcgcgcgtaaaaaatgcccgttacacgatagcccctgcgtccacacgatagccccattctacacgatagcttttcgggatttcgctccaaaacggcaaaacgagccatttgcaaaccgatttgaggc

SEQ ID NO: 34019 - DNA, 260 bp, Unknown
  Description of Unknown: RightRegion for integrase B8020 sequence
attatccgggagattcacctgaatactgatcataccgttgactctgttgatttcttatagcgtcttgtactaactggttgactccgtttggggtagtttagttagtacaagacaatatttattattttacccgcagtctctgaccaacatagatcaaattagggttggatagcccattaagctgcgcaaccttctggtaggatgtgccatacttggatgcaataccggaaagcgtatcaccgctctgcacggtatagtat

SEQ ID NO: 34020 - DNA, 260 bp, Unknown
  Description of Unknown: RightRegion for integrase B8021 sequence
tcttttgtgcagtccattactgttcacgagaacggagaaatggatattgtttttttataatctcgtttctactaactacgcacttcccgtcggtactgcatagttagtaaaactatattttttgtgcaattttccttttgaggggttccgatccggctctgatccatgcacttccagaggcataatgcacactgcttcgccttcttgattgtctgaaacgctccgatctggctactggcattcttccaggtcttgcgaac

SEQ ID NO: 34021 - DNA, 260 bp, Unknown
  Description of Unknown: RightRegion for integrase B8022 sequence
tctttcattcaatccgtagttgtgtatgacagctatcgtttagacattactttcttataatgctacaaatgctaacaacgcaaaaagagccatcctttcggacgactctttcttttgtacgttgttagccttatcgggcatggctttgttttcttcttttgtatggttatacaataacatatcatgtcgagaattgcaatcaaaatcgttagacaaatttcgacatcattcgcacttaacaaaaaatgctaccggcattc

SEQ ID NO: 34022 - DNA, 260 bp, Unknown
  Description of Unknown: RightRegion for integrase B8023 sequence
tcgtttgttgaatcggtgctggtgtatgaggatggaagcatggacattcgttttttgtagtctttgtcgtactaactatgcaccgcctgtcggttcatcggctaagatcagctgcggctgtgtaatcagcgctcttgcgactgcggcacgctgtttttgcccgccggatacttcatacggatacttttccagcaaatgcgtgatttcaagcttctttgcaatcggttctaatttctgcatcatttgcgggtactgttctc

SEQ ID NO: 34023 - DNA, 260 bp, Unknown
  Description of Unknown: RightRegion for integrase B8024 sequence
atcattcaggagattcatgtgaacgaagaccatgccataacctccgtcgattttctgtgatgtgtcttgtactaactacactgttccattcggagccgacaaaactatgacggccgtcctctccggaactgccgacatcggctttatgggttcggaagcttctatctacacatataacgagggggcgaatgattatgttgtaaactttgcccagctcacccagcgcgccgggaacttcctggttgccagggaagatatta

SEQ ID NO: 34024 - DNA, 260 bp, Unknown
  Description of Unknown: RightRegion for integrase B8025 sequence
tccattgtcaaggaaatccgtgttgaccatggcaaaaacattcatattatttttttatgattgttatactactaactgaacccctccggtcggctcgtcggccagcacgatagccggtttggtaatcagggcgcgtgcaatcgccacacgctgctgctgtccgccggaaagattattcggcatatttttcagtttatcttccagccccagcaggtgaacgatctcgtccaaaaacttctgatccaccgtgtccccgtcca

SEQ ID NO: 34025 - DNA, 260 bp, Unknown; identical to SEQ ID NO: 33864
  Description of Unknown: RightRegion for integrase B8026 sequence

SEQ ID NO: 34026 - DNA, 164 bp, Unknown
  Description of Unknown: RightRegion for integrase B8027 sequence
tcgtttgttgaatcggtgctggtgtatgaggatggaagcatggacgttcgttttttgtagtctttgtcgtactaactatgcaccgcctgtcggttcatcagcaaggataatcgcaggcttcgtaattaaagctcgtgcaatcgctacacgttgctgttgaccgc

SEQ ID NO: 34027 - DNA, 260 bp, Unknown; identical to SEQ ID NO: 33858
  Description of Unknown: RightRegion for integrase B8028 sequence

SEQ ID NO: 34028 - DNA, 109 bp, Unknown
  Description of Unknown: RightRegion for integrase B8029 sequence
atcattaaggagattcatgtgaatgaagaccatgccataacctccgtcgattttctgtgatacgtcttgtactaactatactgttccatttggcgccgacaagaccatg

SEQ ID NO: 34029 - DNA, 260 bp, Unknown
  Description of Unknown: RightRegion for integrase B8030 sequence
tcttttattgataaaattgtgattcatgaagacggtaaaattgatattatttttttatagctttatgtgtactaactacgcatcccccgtcggctcgtcgcagagcagaatatccggatttttcacgattgccctgccgattgccgtccgctgctgctgaccgccggacaactggctcggaattttgttctgatgttctgtcagtcccagcacatcaagcagttcatcaatatctaacggccggctgcttaaatatgcgc

SEQ ID NO: 34030 - DNA, 260 bp, Unknown
  Description of Unknown: RightRegion for integrase B8031 sequence
tcttttgtcgaatctgtgctggtgcatgaagacggaagcatggacattcattttttataatttttgtcgtactaactctgcattgcctgtcggctcatctgcaaatataatttccggacgattcaccagtgctcttgcaattgctactctctgctgctgtcctccggataactgatttggcagattataaatccggttttcaatccccagagttgcaataatatcatttacatacgcttcatccacttttcttccatcca

SEQ ID NO: 34031 - DNA, 161 bp, Unknown
  Description of Unknown: RightRegion for integrase B8032 sequence
tcttttgttgaatcggtgctggtatacgaagatggaagcatggacattcattttttatgatcatcttcgtactaactttgcaccgcctgtcggctcatctgcaaatataatttccggacgattcaccagtgctcttgcaattgctactctctgctgctgtc

SEQ ID NO: 34032 - DNA, 260 bp, Unknown
  Description of Unknown: RightRegion for integrase B8033 sequence
tcctttgtcgataaaatcatcgtatatgaggacggcagcatggacattctttttttatagtttccttcttactaagtccgcactacccgtaggttcgtctgccaaaataatcgcaggctttgttgccaaagcccgagcaatcgcaactctctgttgctgacctccggaaagattatttggcagattcctcagtttcttctgcaaaccaagagcgtgaataatctctttgtatctgtcctgccaccgtcaatctcaatggg

SEQ ID NO: 34033 - DNA, 109 bp, Unknown
  Description of Unknown: RightRegion for integrase B8034 sequence
atcattcaggagattcatgtggacgaagaccatgccatagcctccgtcgattttctgtgatgcgtcttgtactaactatactgttccatttggtgccgacaagaccatg

SEQ ID NO: 34034 - DNA, 260 bp, Unknown
  Description of Unknown: RightRegion for integrase B8035 sequence
tcttttgtcgaatctgtgctggtgcatgaagacggaagcatggacattcattttttataatttttgtcgtactaactctgcattgcctgttggctcatcagccaaaattaattcgggatttgttattatcgcacgtgccactgctgccctttgcttctgtcctcctgacacctcatatggatatttattaagcagcttttcaattccaagcagcgaagctataggtgcaagccttttttccatatccctatagtccacac

SEQ ID NO: 34035 - DNA, 260 bp, Unknown
  Description of Unknown: RightRegion for integrase B8036 sequence
atcattcaggagattcatgtgaacgaagaccatgccatagcctccgtcgattttctgtgatgcgtcttgtactaactatactgttccatttggagttagccagttagtacaagacgattttgattatcctacataagtcttaccgccataccgtacagcaatccatccagatggaatctgcatccagatatcactgccgatcatcttacatccccagtaagattctccatgtattctgtccaacaatgccatcaattgta

SEQ ID NO: 34036 - DNA, 260 bp, Unknown
  Description of Unknown: RightRegion for integrase B8037 sequence
tctatcatccgggagatccgcgtggatcaggataagaatgtccgtattatttttttgtaactttttatactactaacttgcaccgtcctgtcggttcatcagccaggacgattgcaggctttgacaccaaagcgcgggcaatggctacgcgctgctgctggccgccggaaaggttattgggcatattgttcagcttatcctccagccccagcatctgaacgacttctttcataaacttcttgtctaccttgtttccgtcc

SEQ ID NO: 34037 - DNA, 260 bp, Unknown
  Description of Unknown: RightRegion for integrase B8038 sequence
tctatcattcgtgagatccgcgtggatcatgagagaaatgtccgtattatttttttgtgatttttatactactaacttacaccgtcctgtaggttcatcagccagtacgattgctggatttgttaccattgctcttgcagcggctacccgctgctgttgaccgccggacatctgatagggatatttgttcaatacttcctgaatgttcagcgcctttgcaatctgcgggacacatttttgaatctcgcttggtttggttc

SEQ ID NO: 34038 - DNA, 260 bp, Unknown
  Description of Unknown: RightRegion for integrase B8039 sequence
tcttttgtcgaatctgtgctggtgcatgaagacggaagcatggatattcattttttataatttttgtcgtactaactctgcattgcctgtaggctcatcagccagtattattggagcatctgataccaatgctctggcaatagctactctttgctgctgtccaccagataatttcataacatttctttttatttgttttttatctaagcctagttcaaacaagatactttcatctgctgatttattcactaatctaatat

SEQ ID NO: 34039 - DNA, 153 bp, Unknown
  Description of Unknown: RightRegion for integrase B8040 sequence
ataatcaaggagattcgggtggaggacaaccatgttgtgggcgtaacatttaacgtctaaattttttgcacatattagggactaattacccgttttctgtagtaatagggcagttagtccccaaatcaaacaccccgccggggcttctgaaat

SEQ ID NO: 34040 - DNA, 260 bp, Unknown
  Description of Unknown: RightRegion for integrase B8041 sequence
tcttttgttgaatcggtgctggtatacgaagatggaagcatggacattcattttttatgatcatcttcgtactaactacgcaccgcctgtaggctcatcacacaacaggatatccggattttttataatagctcttccaattgaagttctctgctgctgaccgcctgataactggttaggcttcttatcaacgtgatctgaaagtcctaatgtattaagaatctcatctgtatcaagtgccttgtcacttaagtaagcac

SEQ ID NO: 34041 - DNA, 260 bp, Unknown
  Description of Unknown: RightRegion for integrase B8042 sequence
gttatatcagaaattcgtgttgaccgtgataataacgtcacgggaattatttttgggtagtgttgtactaatgcaacactacctgtgggttcatctgccagaatgatagcgggtgctgccgccagcgcacgggcaatggctacacgctgctgttgaccgcctgagagctgattgggcagggcatccagacggtcgctcagtccaagcgtctgcacgatctgctgcacaaaagccttgtttacctttccgccatccagttc

SEQ ID NO: 34042 - DNA, 260 bp, Unknown
  Description of Unknown: RightRegion for integrase B8043 sequence
atcattcaggagattcatgtgaatgaagaccatgccataacctccgtcgattttctgtgatgcgtcttgtactaactgtactgttccatttggagttagctagttaatacaagacgattttgattatcttacataagtcttcccaccatatcttgcagcaatccagcctgatggaatctgcatccagatatcattgctgatcatcttacattccaagcaaaactctccatgtgttctgtccaacaatgccgtctggtgta

SEQ ID NO: 34043 - DNA, 260 bp, Unknown
  Description of Unknown: RightRegion for integrase B8044 sequence
tcctttattgattatatttatatttacgaggacggcagcatggacattcattttttataatcttatagtttgactaactctggttaaccagttgcctcatctaaatacactttactctgcaaaatgcgattctgggccgcatagcgaagtgcctttatcaattcaagggcaattaaaataacaagtccacctatgtccacaaaaacaattgtctctaactgactgagagcggttgcctttctttgagaatatgcttctgc

SEQ ID NO: 34044 - DNA, 260 bp, Unknown
  Description of Unknown: RightRegion for integrase B8045 sequence
ataactattgatgaagaatctgtaaatataacttggagaattgaaagcaaaattgtatagtctatgttaatgggatttgggtgtaatgcttgtggtgtcactggttgtcgaattatcgaatctccaagggaacgaattatagctaccgtaacaaataattttgttccctgtaacggaagatttccaactttaattgcaataataactatgtttttcgccacagggatttcattaccatttcgttcgcttgtttcggcggg

SEQ ID NO: 34045 - DNA, 260 bp, Unknown
  Description of Unknown: RightRegion for integrase B8046 sequence
gtagagataaccgcaagccgggaaatccggttttatttgtgcatgaaatatactacttaatgtttttacccggatggctactggatcgaagtagtaccatacaggtaaatcaaacgaagttcagcaaaagaccaggggcgcttctacccctggtctttctctgtatcctgtcgatcagtttcaggacagctctctctgcacgacaaatcatatcaacattcatatgtattgtcaatgtaaatcgttcggcatagttcgac

SEQ ID NO: 34046 - DNA, 260 bp, Unknown
  Description of Unknown: RightRegion for integrase B8047 sequence
tcttttgttgaatcggtgctggtatacgaagatggaagcatggacattcattttttatgatcatcttcgtactaactacgcaccgcctgtcggtactgctttgttagtacaatcaatatattgtggttatccacacagttatcctctatatgtggacaaaataaaagcaaggcggcacattgtccgtcttgcttctcttttactccaaaattatcgacattattcttcgatgtattcaaccagcttcggatcgccgctga

SEQ ID NO: 34047 - DNA, 260 bp, Unknown
  Description of Unknown: RightRegion for integrase B8048 sequence
tctatcattcgtgagatccgcgtggatcatgagagaaatgtccgtattatttttttgtgattttttatactactaacttacaccgtcctgtcggttcatctgctaatagaatcgccggtttggctgcgagtgcccgcgcgatcgccacacgctgctgctgtcctcccgaaagctggtttggcagcacgtttaatttttctttcaatccgagcgcctctgcgatctccccgataaatgcattgtccacggtttttccgtca

SEQ ID NO: 34048 - DNA, 260 bp, Unknown; identical to SEQ ID NO: 34029
  Description of Unknown: RightRegion for integrase B8049 sequence

SEQ ID NO: 34049 - DNA, 260 bp, Unknown
  Description of Unknown: RightRegion for integrase B8050 sequence
gttatatcagaaattcgtgttgaccgtgataataacatcacgggaattatttttgggtagtgttgtactaatgcgacactacctgttggctgtgttaagttagtacaaaataaaaaccccagcaaggctactgcctgccggggttttattttacagtccatttcctttgaacattgcccacccgccttttgaaaacgggttgtttttatcttttggaaagtcctttagatattgcttgaataaacttgttcttatatgtt

SEQ ID NO: 34050 - DNA, 260 bp, Unknown; identical to SEQ ID NO: 34035
  Description of Unknown: RightRegion for integrase B8051 sequence

SEQ ID NO: 34051 - DNA, 260 bp, Unknown
  Description of Unknown: RightRegion for integrase B8052 sequence
tctatcattcgtgagatccgcgtggatcatgagagaaatgtccgtattatttttttgtgatttttatactactaacttacaccgtcctgtcggttcatctgccagaacaattgccggacggttgatcagtgcccgcccgatggatacgcgctgctgctgtccgccggagagttcttccggaagatgcgtttttcttccgttaagtcccaactcatcgatcagtttatccagacgctttttatccaccgtctgtccgtcaa

SEQ ID NO: 34052 - DNA, 139 bp, Unknown
  Description of Unknown: RightRegion for integrase B8053 sequence
tcttttgttgaatcagtgctggtatacgaagatggaagcatggacattcattttttatgatcatcttcgtactaactttgcaccgcctgtcggctcatctgcaaatataatttccggacgattcaccagtgctcttgca

SEQ ID NO: 34053 - DNA, 260 bp, Unknown
  Description of Unknown: RightRegion for integrase B8054 sequence
tcttttgtcgaatctgtgctggtgcatgaagacggaagcatggacattcattttttataatttttgtcgtactaactctgcattgcctgtcggctcatccgcaaatataatttccggacgattcaccagtgctcttgcaattgctactctctgctgctgtcctccggataactgatttggcagattataaatccggttttcaatccccagagttgcaataatatcatttacatacgcttcatccacttttcttccatcca

SEQ ID NO: 34054 - DNA, 225 bp, Unknown
  Description of Unknown: RightRegion for integrase B8055 sequence
tcttttgtcgaatctgtgctggtgcatgaagacggaagcatggacattcattttttataatttttgtcgtactaactatgcaccgcctgtgggttcatctgccagaatgatagcgggtgctgccgccagcgcacgggcgattgccacacgctgctgctgaccgccggagagctgattgggcagcgcatccagacgatcatccagcccaagtgtctgtacaatctg

SEQ ID NO: 34055 - DNA, 260 bp, Unknown
  Description of Unknown: RightRegion for integrase B8056 sequence
atcattcaggagattcatgtgaacgaagaccatgccatagcctccgtcgattttctgtgatgcgtcttgtactaactatactgttccatttagagttagctagttagtacaagacaattttgattatcctacatatgtctttccaccatatcgtgcagcaatccatccagatggaatctgcatccagatatcattgctgatcatcttacattccaagtaaaactctccatgtgttctgtccgacaatgccatctggtgtg

SEQ ID NO: 34056 - DNA, 260 bp, Unknown
  Description of Unknown: RightRegion for integrase B8057 sequence
tcttttgtcgaatctgtgctggtgcatgaagacggaagcatggacattcattttttataatttttgtcgtactaactctgcactgcctgtcggctcatctgcaaatataatttccggacgattcaccagtgctcttgcaattgctactctctgctgctgtcctccggataactgatttggcagattataaatccggttttcaatccccagagttgcaataatatcatttacatacgcttcatccacttttcttccatcca

SEQ ID NO: 34057 - DNA, 260 bp, Unknown
  Description of Unknown: RightRegion for integrase B8058 sequence
tctttcgtccagtccataacccttcacgaagacggtaaaatggacattgtttttttatgatgtccgttttactatgtccgcattgcccgtcggctcatctgcaaatataatttccggacgattcaccagtgctcttgcaattgctactctctgctgctgtcctccggataactgatttggcagattataaatccggttttcaatccccagagttgcaataatatcatttacatacgcttcatccacttttcttccatcca

SEQ ID NO: 34058 - DNA, 260 bp, Unknown
  Description of Unknown: RightRegion for integrase B8059 sequence
tcttttattgataaaattgtgattcatgaagacggtaaaattgatattatttttttatagctttatgtgtactaactacgcatcccccgtcggctcgtcgcagagcagaatatccggatttttcacgattgccctgccgattgccgtccgctgctgctgaccgccggacaactggctcggaattttgttctgatgttctgtcagtcccagcacatcaagcagttcatcaatctctaacggccggctgcttaaatatgcgc

SEQ ID NO: 34059 - DNA, 90 bp, Unknown
  Description of Unknown: RightRegion for integrase B8060 sequence
tctatcattcgtgagatccgcgtggatcatgagagaaatgtccgtattatttttttgtgatttttatactactaacttacaccgtcctgt

SEQ ID NO: 34060 - DNA, 260 bp, Unknown
  Description of Unknown: RightRegion for integrase B8061 sequence
tcttttgtcgaatctgtgctggtgcatgaagacggaagcatggacattcattttttataatttttgtcgtactaactatgcaccgcctgtcggttcatccgcaagtataacagcaggatgggtaatcaatgcccttgctattgcaactctctgctgttcaccgcctgacatctgtgatggaaacttattcttacaatgcgatattcccaattcctctaacaaatcatcaacctcattctcatcaggcttcttgccatcta

SEQ ID NO: 34061 - DNA, 139 bp, Unknown
  Description of Unknown: RightRegion for integrase B8062 sequence
tcgtttgttgaatcggtgctggtgtatgaggacggaagcatggacatttgttttttgtagtctttgtcgtactaactatgcaccgcctgtcggctcatctgcaaatataatttccggacgattcaccagtgctcttgca

SEQ ID NO: 34062 - DNA, 260 bp, Unknown
  Description of Unknown: RightRegion for integrase B8063 sequence
tctataatagattatataacccttgataaagactataatatgaaaatattttttatttaattttttggtactttttaactttaccagatgataatgttaaaaagtactatctttattataataattaaagcaatctaccatgcccttttgatatacctttttaaatatatttgaaaattccattacaatatttttttcattttctgttaatccttccactaatttttttaatgttacatcttttccttcatttattttta

SEQ ID NO: 34063 - DNA, 95 bp, Unknown
  Description of Unknown: RightRegion for integrase B8064 sequence
tcgtttgttgaatcggtgctggtgtatgaggacggaagcatggacattcattttttatgatcatcttcgtactaactatgcaccgcctgtcggct

SEQ ID NO: 34064 - DNA, 260 bp, Unknown
  Description of Unknown: RightRegion for integrase B8065 sequence
tcttttgtcgaatctgtgctggtgcatgaagacggaagcatggacattcattttttataatttttgtcgtactaactctgcattgcctgtaggctcatcagcaagaataagcttcggattagtaataatggctcttgcacttgccactctctgcttctgtccgcctgacatctgataaggatatttgtttaatacatcttcaatgccaagctctcttgcagtctgtcttactcttaattcaatctcccttgccggaacat

SEQ ID NO: 34065 - DNA, 227 bp, Unknown
  Description of Unknown: RightRegion for integrase B8066 sequence
atcattgcagaaatccaacttgatgataaccaggtaaaagaaatcatcttcaagtcataatttttttatgccctaaatggtggactaacttatatatctctgtcgacactgctccgccgaagaaaacaatgtggctgctgttttccagcagctccctgagcttctgctgttctgtcatccctgctcctcctttgttgtggactgccggtcggtttactgatggcttt

SEQ ID NO: 34066 - DNA, 260 bp, Unknown
  Description of Unknown: RightRegion for integrase B8067 sequence
atcattgcagaaatccaacttgatgataaccaggtaaaagaaatcatcttcaagtcataattttttatgccctaaatggtggactaacttatatatatctgtcgacactcctgctccgccgaagaaaacaatgtggctgctgttttccagcagctccctgagcttctgctgttctgtcatccctgctcctcctttgttgtggactgccggtcggtttactgatggctttccccggtgaccatgcccagcagctgcatact

SEQ ID NO: 34067 - DNA, 260 bp, Unknown
  Description of Unknown: RightRegion for integrase B8068 sequence
tcgtttgttgaatcggtgctggtgtatgaggacggaagcatggacattcgttttttataatctttgtcgtactaactctgcactgcctgtcggttcgtcagcgagcaaaatggcaggttttgcagctaaagcccttgcaattgccactctctgctgctgtccgccggatagagcacttggcagattttccaattttgtccgaataccaagtgtatcaatgatttcatctacatatttcttttcaatcttttttccatcca

SEQ ID NO: 34068 - DNA, 260 bp, Unknown
  Description of Unknown: RightRegion for integrase B8069 sequence
agcagtaataaacttggctggtgtgagtttccgtataaatcaagggtaataccaacctgagaacccttaaaaacccttaaagtcccttacatggcgagaaatcccatgaaatggggcttttttaggcttaaaaggtaggaaatgcctttaaaaaatacggaatttgtaaatgccaacttgaaaagagaaagaggagtttaaaaggcgtaaatgtcagagatgatattggtaaaaagtatgggttttaaatcgttcaaaaa

SEQ ID NO: 34069 - DNA, 260 bp, Unknown
  Description of Unknown: RightRegion for integrase B8070 sequence
tctatcattcgtgagatccgcgtggatcatgagagaaatgtccgtattatttttttgtgatttttatactactaacttacaccgtcctgtcggctcgtctgcaaggatcagcgtcgggcgcgtgatcagggcacgtccgattgccacgcgctgctgctgtccgcctgataactggctcggcaaatggttacggcgttccttcagattaagaaccgtaagcagttcttccagatattttttgtccggcttctgatagtcaa

SEQ ID NO: 34070 - DNA, 142 bp, Unknown
  Description of Unknown: RightRegion for integrase B8071 sequence
tcgtttgttgaatcggtgctggtgtatgaagacggaagcatggacattcattttttataatttttgtcgtactaactctgcattgcctgttggctcatcagccaaaattaattcgggatttgttattatcgcacgtgccact

SEQ ID NO: 34071 - DNA, 214 bp, Unknown
  Description of Unknown: RightRegion for integrase B8072 sequence
tctatcattcgtgagatccgcgtggatcatgagagaaatgtccgtattatttttttgtgatttttatactactaacttacaccgtcctgtcggctcgtcggccagcacgatagccggtttggtaatcagggcgcgggcaatcgccacacgctgctgctggccgccggaaagattgttcggcatatttttcagtttatcttccagccccagcagg

SEQ ID NO: 34072 - DNA, 260 bp, Unknown
  Description of Unknown: RightRegion for integrase B8073 sequence
gaagccatttatatagataaagaaagccgtaaactatgcggttttaaatttttactttaggggtgtagtaacatataaaaatccgttgaattcgagccgcatgccaccgctctggagcaaaaaggcgacggatatgtagtagcctcattaggcgaggattccggctatgttccctataccgctttttccgcaaagaaaagctatattgaagcgcatcccgatgttgttcaggcgtttaccaacgcccttcagaagggtat

SEQ ID NO: 34073 - DNA, 260 bp, Unknown
  Description of Unknown: RightRegion for integrase B8074 sequence
ataactattgatgaggaatctgtaaatataacttggagaattgaaagcaaaattgtatagtctatgttaatgggatttgggtgtaatgcttgtggtgtcactggttgtcgaattatcgaatctccaagggaacgaattatagctaccgtaacaaataattttgttccctgtaacggaagatttccaactttaattgcaataataactatgtttttcgccacagggatttcattaccatttcgttcgcttgtttcggcggg

SEQ ID NO: 34074 - DNA, 260 bp, Unknown
  Description of Unknown: RightRegion for integrase B8075 sequence
tctatcattcgtgagatccgcgtggatcatgagagaaatgtccgtattatttttttgtgatttttatactactaacttacaccgtcctgtcggttcatccgcaaggatcagctccggctttgtgatgattgcccgcgccaccgccgcacgctgtttttgtccaccggacacctcatacggatacttctccagaatatccacaatgccaagtttctgcgcaattggataaagccactcattcatctgcttataaggcacat

SEQ ID NO: 34075 - DNA, 260 bp, Unknown
  Description of Unknown: RightRegion for integrase B8076 sequence
tcctttgtcgaccgcgtacgcatctatgaggacggaagcatggacatcatttttttataaactcacttgtactaactaagcaccacccgtcggctcatcgcagagcaggagtttcggattcttggcgatcgcacgcgcgatagacacccgctgctgttctcctccggaaagctgcgccggaaagttatttttgcggtccgccagtcccacttttgtgagcatctccccggcatcgagcgaatttctgcacacctgcgccg

SEQ ID NO: 34076 - DNA, 260 bp, Unknown
  Description of Unknown: RightRegion for integrase B8077 sequence
tccttatccgaacaaattctgtttatcaacggtataatcggtatgcttgttcgccgataaggcgcagcccctctccgatttggagaggggttgctttttatttcacaatgcacctgtaatacgcacaaagcttttcctccgggccggggccgtccttgtccatcaagaacgcccgcgccagttccgcgtagaactccggcacgttgactccgaatttccgcgccacatcgtagtagtccgagtacatcatgttcatggta

SEQ ID NO: 34077 - DNA, 260 bp, Unknown
  Description of Unknown: RightRegion for integrase B8078 sequence
tcctttgtcgaccgcgtacgcatctatgaggacggaagcatggacatcatttttttataaacttacttgtactaactaagcaccacccgtcggctcatcacagagcagaatatccgggttcttgacgatcgcccttccgatggatactctctgctgctgaccgccggagagctgattcgggagcttgtatctgtgctcataaagtctcagcgtatgtaacagttcatcaatatccagcgcatgatcggacagatacgcgc

SEQ ID NO: 34078 - DNA, 260 bp, Unknown
  Description of Unknown: RightRegion for integrase B8079 sequence
tcgtttgttgaatcggtgctggtgtatgaagacggaagcatggacattcattttttataatttttgtcgtactaactctgcattgcctgtcggctcatctgcaagtatcaggcttggattgattatcagtgccctcgccaccgccgccctctgcttctgaccgcccgacacctcatacggatatttttttaacaacggctcaattccaagctgcaccgcaagcggtatcagtctccgcttcatctccgcatgcttctccc

SEQ ID NO: 34079 - DNA, 260 bp, Unknown
  Description of Unknown: RightRegion for integrase B8080 sequence
atgctgatagaaaaggtagtggtagaaggcgaaaacatacgtgtttactggaatttctagcccttgttattctcgaagtaagtatgttaatactttccttccccatggtatttccctttctttcatgtcatgattgcatatgggatttacagccctgcacggaagcttccttgcccgcgctcctgtcccagtccctgggcaggatgaaatccactgttctcagcagacggtccgtagacaccacttggacccgtatggtc

SEQ ID NO: 34080 - DNA, 260 bp, Unknown
  Description of Unknown: RightRegion for integrase B8081 sequence
atcatcaaagaagtctgcctcgatgaaaataaccaagtttctgaggtaatttttctttagtctgttttgttactaactgtataactccgtttggagtaagtggattagtatataactcttgaatacatagacatgtagaattgtggtttgcccggctgattaccgggctcttcttatgcctttttcacccggtcacgtccctgatactgagccaggatccagcctctggtgattcgcatatagatgcccctggttcccac

SEQ ID NO: 34081 - DNA, 109 bp, Unknown
  Description of Unknown: RightRegion for integrase B8082 sequence
attgtatcagatatacatgtggcgaaagactccactgtgaaagaagtgaattttttataataagtcttgcactaaccaatgagttccatttggggctgataagaccatg

SEQ ID NO: 34082 - DNA, 260 bp, Unknown
  Description of Unknown: RightRegion for integrase B8083 sequence
gaaaggagacagaaacgtgaatacagcaagaactgtgacggtgattcctgcaacgcttaatttgtttacaagtacgcctaaaatgtcacaaaacaaacgtaaagtggcggcatatgcaagagtttcaacagacaatgaagaacagctttcaagttacgcagcgcaggttgattattatactagatacataaaatcgaagacagaatgggattttgtggatatttatacagatgaaggaatcacagcaacaaatacgaaaa

SEQ ID NO: 34083 - DNA, 260 bp, Unknown
  Description of Unknown: RightRegion for integrase B8084 sequence
gttatatcagaaattcgtgttgaccgtgataataacatcacgggaattatttttgggtagtgttgtactaatgtgacactacctgttggttatgtataattagtacaaatagaaaaatacccggcagacctaaatttgccgggttcttcttttattctgttatatcgaatttttcgccacacatagggcagtacctgtcttcttgtgctactctctcatatccacatacttcgcatttaaagtaacatcttttttcagtt

SEQ ID NO: 34084 - DNA, 109 bp, Unknown
  Description of Unknown: RightRegion for integrase B8085 sequence
atcataaaaaaaataaacatagatgatgaaaaaaatattgaaatttatctaaatatttagagcatgaggctatttgatagctttgtgctttttgctttatggggctgta

SEQ ID NO: 34085 - DNA, 260 bp, Unknown
  Description of Unknown: RightRegion for integrase B8086 sequence
atcattcaggagattcatgtgaacgaagaccatgccatagcctccgtcgattttctgtgatgcgtcttgtactaactatactgttccatttggtgccgacaagaccatgactgctgtcctttccggaacagccgacatcggatttatgggatcagaggcttccatttatacttataatgaaggggctcgtgattatgtcgtaaactttgcacagctcactcagcgtgccggaaactttctggttgccagagatgatatca

SEQ ID NO: 34086 - DNA, 260 bp, Unknown
  Description of Unknown: RightRegion for integrase B8087 sequence
attataaaaagaataaatatagataatgaaaaaaacattgaaatttatctaaatatttaaaagcacaaagtttaaataactctgtgcttttatttctaagtaaacaatatttaaataagttttccaattttctggaaatcctaataaaaaaaatcgactctaacatgagccacataactaaaagtcagaggtgtgtaagagtctatatcatatgtaaatgatatcataataattatttaaagtcaaacattttttgcctt

SEQ ID NO: 34087 - DNA, 260 bp, Unknown
  Description of Unknown: RightRegion for integrase B8088 sequence
attatatcagatatacatgtgacgaaagactctactgtgaaagaagtgaattttttataataagtcttgcactaaccaatgagttccatttggagtcatatagttagtgcaaaacttttacaccgctaccctacatactttttaccggaatagtatgctgcaatccagccgcttggaatcttgatccagatgtcacttccgttcttgcggacctccttgcaggttacgcgcgtgcctttcttgagtctcccgttatcgtg

SEQ ID NO: 34088 - DNA, 109 bp, Unknown; identical to SEQ ID NO: 34081
  Description of Unknown: RightRegion for integrase B8089 sequence

SEQ ID NO: 34089 - DNA, 260 bp, Unknown
  Description of Unknown: RightRegion for integrase B8090 sequence
atgcttatagaaaaagtagtggtagaaggcgaaaacatacgtgtttactggaatttctagcctttgttattctggtagtaagtatgttaatactttccttccccatggtgtttccctttctttccagtcatgattgcatgtatgacttacagccttacacggaagcttccttacccgcgctcctgtcccagtcccggggcaggataaaatccactgtcctaagcagacggtccgtggacgccacctgaacccgtatgggc

SEQ ID NO: 34090 - DNA, 260 bp, Unknown
  Description of Unknown: RightRegion for integrase B8091 sequence
ctccgtcgtccagaggaaaagggcaaaccctataagtatttccgtgtagaatttaactgaaccacaaaaaacaccaggcaggagctttcccgtctggtggttttatacatttattaagttttatgcatagcctttatgcaaaattatacccctggttttccagtacgccctcttttggtcattggaatgccagctttgcacagtgggcattcttctggcttgtaggtctgtacatccatatggagcaatgcagtgcttgg

SEQ ID NO: 34091 - DNA, 260 bp, Unknown
  Description of Unknown: RightRegion for integrase B8092 sequence
atcatatccgaaatcaaggtggaccgtgataataacatcacggatattatttttagctaatatccgtactaattatacataacctgtcggtgctgttcaattagtacgtacttggaaaagcctagaattatcacgttcttaggctttttcatgcttttaaaatcattcatacaaaccttgaattttcctatatccattcaaaaaacactttttgcatattgtgccgcaaacgaaatcaaactcaatatccgataatatcc

SEQ ID NO: 34092 - DNA, 260 bp, Unknown
  Description of Unknown: RightRegion for integrase B8093 sequence
gtcatatcggaaattcgtgttgaccgtgataataacatcacgggaattatttttgggtagtgttgtactaatgcgacactacctgtgggttcatctgccagaatgatagcgggtgccgctgccagtgcacgggcaatggctacccgctgctgttgaccacctgagagctgattgggcagtgcatccagacggtcactcaatccaagcgtctgcccgatctgcttcacaaaagatttatttacctttccaccatccagttc

SEQ ID NO: 34093 - DNA, 260 bp, Unknown
  Description of Unknown: RightRegion for integrase B8094 sequence
tctattattgataaaatatatgtagaaaatggcgaaataaaagagattacatttctgtaacctcttttatttttagtcgttcgtctcgattggtgctccgactggacatactcctgcgcaagttccacatgatatacattgttctggatctataacatatttatcttcaccttgtgctatacattccataggacattgtgctgcacatgctccgcatgatatacatttgtcagtaattttataagccattaaactcacca

SEQ ID NO: 34094 - DNA, 260 bp, Unknown
  Description of Unknown: RightRegion for integrase B8095 sequence
atcctcattaagaaagtagaggtagatggtgaaaacatacgtgtttactggaacttctagcatttgttaatttgaaagaaagtattttgaaactctctttccccatcctcttatcctcctgttattcctccgcagaagtgctcgcgggaataaagtcgatcgtcctggccagcttatccgttcccgtgaccatgacgcggatcggctgaccgagtttatataccttcctcgtcatatcgccgatcaattctaaatgctct

SEQ ID NO: 34095 - DNA, 260 bp, Unknown
  Description of Unknown: RightRegion for integrase B8096 sequence
atcatatccgaaatcaaggtggaccgtgataataacatcacggatattatttttagctaatatccgtactaattatacataacctgtcggtgctgttcaattagtacgtacttgaaaaagcctagaattatcacgttcttaggctttttcatgcttttaaaatcattcatacaaaccttgaattttcctatatccattcaaaaaacactttttgcatattgtgccgcaaatgaaatcaaactcaatatccgataatatcc

SEQ ID NO: 34096 - DNA, 260 bp, Unknown
  Description of Unknown: RightRegion for integrase B8097 sequence
atcatcaaagaaatctgtatcgatgaaaataaccaggtttcagaggtgatttttctttagcctgtcatgttactaactatataaccccatttggcgtacgttagttagtaacatgacgttcagcattataataaggtaagattgtggtattgccccggtgactatccggggttcttcttgtttatggctcacttgtacaaaactatcatttttcatacttttgaaaccctgtttttaccctgatactgagccaggaccca

SEQ ID NO: 34097 - DNA, 109 bp, Unknown
  Description of Unknown: RightRegion for integrase B8098 sequence
aagaatgacaataaaaagaaacgtcgttcccttaaaataaaggatatcgagttctattaatattttatggaagtatgaacaattaaccaaccatggctgtattccatct

SEQ ID NO: 34098 - DNA, 260 bp, Unknown
  Description of Unknown: RightRegion for integrase B8099 sequence
gtgctgaaagagatccgtattgataacgatcagaatattactggtatttcatttttttagcctattgttgtactaatgttacagaaccggtgggttgtgtaaacttagtataacaaatacaagccccagcatttctgccggggctttcttaaattccgcatatttgcggttatttcacatatacatctccatcataatatgccgcaatccatccagacggtaccagaatccagatatcacttcctacattcttgacggcc

SEQ ID NO: 34099 - DNA, 109 bp, Unknown
  Description of Unknown: RightRegion for integrase B8100 sequence
atcattcaggagattcatgtgaatgaagaccacgccataacctccgtcgattttctgtgatgcgtcttgtactaactatactgttccattcggagccgacaaaactatg

SEQ ID NO: 34100 - DNA, 137 bp, Unknown
  Description of Unknown: RightRegion for integrase B8101 sequence
atcatatccgaaatcaaggtggaccgtgataataacatcacggatattatttttagctaatatccgtactaattatacataacctgtcggctcatcagccaaaataatatctggattagaaatcaaactacgggctg

SEQ ID NO: 34101 - DNA, 133 bp, Unknown
  Description of Unknown: RightRegion for integrase B8102 sequence
gggcagaacacggctactatctcgtgttcggatattgcgtgttccgctccaccattttaatcgctggtcgaaccccaggcggcgagattatcgtcttgccttacggtttcgcgctggcggccaagttagagag

SEQ ID NO: 34102 - DNA, 260 bp, Unknown
  Description of Unknown: RightRegion for integrase B8103 sequence
attgtatcagatatacatgtggcgaaagactccactgtgaaagaagtgaattttttataataagtcttgcactaaccaatgagttccatttggggctgataagaccatgaccgcagtcatatccggaaccgccgatattggatttatggggtctgaagcttcaatttatgcttacaatgaaggagccaatgattatgtcgtgaactttgcacaacttacacaacgcgcaggaaattttctggtagcaagagaagaaatcc

SEQ ID NO: 34103 - DNA, 260 bp, Unknown
  Description of Unknown: RightRegion for integrase B8104 sequence
gcgggaaagacagacttggtcaaatttttgccgatttcgggcttctctggcggaatttgaacttcaaagagcaatatgatttagtggatttgctaatcgaaaaaattgtttacgacggcaccaaaggttcgattttcatcaaattttacgacgacggtttgaactgctttaaggaagacctcaaatgattatagaacggaaaatacacattcagaataaacggcacggtcggagaaaactttgtatcggagaatgtccgg

SEQ ID NO: 34104 - DNA, 260 bp, Unknown
  Description of Unknown: RightRegion for integrase B8105 sequence
atcattaaagcgatctatgttacaaaagatcgtaacgtggattatgtagattttttatagatctatatctgttgtactaactatatcgtgccatttggcgttatacggttagtacaacactaattgcataacgaaactgggagagaaaggacaccaggttaaaaacgtgagggtgtcggcgagcctatcaaatgaatcgtcggggctttcgatctgcgtctatcagattgaaataacctcaggggttgaagaacgtgcaa

SEQ ID NO: 34105 - DNA, 260 bp, Unknown
  Description of Unknown: RightRegion for integrase B8106 sequence
tctatcatcaaagaaattcaagtagatcatcacaaaaatattaacattgtttttctgtaaatatacgaaaagccggggatttcccggcttttcataactttattttttatagtactaactaacactatccattaggtttaggtcctgcaatataatcacgttccttcataacaattaagtctgtttgactttttaaaatctcaacaagattatatatatcattgacaaaatagcaaataactcttgcacctgcaatatcc

SEQ ID NO: 34106 - DNA, 159 bp, Unknown
  Description of Unknown: RightRegion for integrase B8107 sequence
aaagacaaaaaacataagacaaacacacttgatatcaacagtattcattttaaattttaatagcagttgtgtcactatttaggtctatcgtgtgacaaaactaacatacaaaaaccacgctcatttagaacgtggctagtagaatatagtgtcgataag

SEQ ID NO: 34107 - DNA, 260 bp, Unknown
  Description of Unknown: RightRegion for integrase B8108 sequence
actcgaaattatattgaccgcaatatagtgattaaccgattgtactctcttgcttcctagtttatgctataattatgtagttgtaacaacataatatcagaaacaaggcccggtgtctagccgagccttattttatttttgaaaacaattccagaataaagcctaatccttttctttcggtttccactctgtgcgatacgctgctacatccagtgtttccacgccggcgcgtatttttttcaatgcgtcacgcacaaaat

SEQ ID NO: 34108 - DNA, 260 bp, Unknown
  Description of Unknown: RightRegion for integrase B8109 sequence
ataattaaagaaatataccctatacctgatacagaaaattttaagattatttttaaataatacttgtacttatttaaccttacacggtggttagggataataactacaaaaaaataaaaaaactttaaaaaaagtattgacatagtattaatactatgttataatatatataagaaaggaggtaagatataatgaagccgagtaaaaatcgggaaaaaagaaaaaaactaacaattaaagaattctcattcaaaatcaat

SEQ ID NO: 34109 - DNA, 260 bp, Unknown
  Description of Unknown: RightRegion for integrase B8110 sequence
gaagaaattttagtggatcctgatacacgaaaaattaaagacgtgaaattgctcatataagaaaacgagggcagtattctaccttacacggtcgagttcgagcccttcgccaccacccttgaaaccgaaggaaatggtaccgttgtcgcctcgctcggcgtcgattccggttatgtcccctacaccgcctactgtgcaaagcagagctatctaaataggcatccggaaattatccagtcgttcacgaatgccatccagaa

SEQ ID NO: 34110 - DNA, 260 bp, Unknown
  Description of Unknown: RightRegion for integrase B8111 sequence
attatagattctattgagtttgttaatgattacagattctatattcatttaaaattctaggaggaactatggggtttattctaactgaaaagatttttaatcattatagtaaaaaagaattaggagacattttgtctcctaaagtttttactcaattatctaccaatactaaaatcctgccttggttttcggaacttgcgaaagtgatagatataaaaaaaataggatatactttagaagattttaaacatgattatcaa

SEQ ID NO: 34111 - DNA, 260 bp, Unknown
  Description of Unknown: RightRegion for integrase B8112 sequence
aagttaaaacgcggtaaagctagcaattcgatgaagattaaagatattgaattctattaattttgtacggaagtagatactatctttcaacattggttgtattcctacaaagacactcattcatgatggacttcataaccgttcatttgctgatgcttttgcaagaaaaaatgaagtcgtatcagcattaaataagaaaaattatggaaatttagcaaatgatacgcatattgatgttttggactataaagctacgttca

SEQ ID NO: 34112 - DNA, 260 bp, Unknown
  Description of Unknown: RightRegion for integrase B8113 sequence
tctatcatcaaagaaattcaagtagatcatcataaaaatattaacattgtttttctataaatatacgaaaagccggggatttcccggcttttcatatatttattttttatagtactaacttacactatccattaggtttaggtcctgcaatataatcacgttccttcataacaattaagtctgtttgactttttaaaatctcaacaagattatatatatcattgacaaaatagcaaataactcttgcacctgcaatatcc

SEQ ID NO: 34113 - DNA, 109 bp, Unknown
  Description of Unknown: RightRegion for integrase B8114 sequence
tctatcatcaaagaaattcaagtagatcatcacaaaaatattaacattgtttttctgtaaatatacgaaaagccggggatttcccggcttttcataactttatttttta

SEQ ID NO: 34114 - DNA, 109 bp, Unknown
  Description of Unknown: RightRegion for integrase B8115 sequence
gaagaaattttagtggatcctgatacacgaaaaattaaagacgtgaaattgctcatataagaaaacgagggcagtattctaccttacacggtcgagttcgagcccttcg

SEQ ID NO: 34115 - DNA, 109 bp, Unknown
  Description of Unknown: RightRegion for integrase B8116 sequence
cttatttcagaaattcactttaaagacaatcgggtgtctgaaatcatttttaatgtgtagttttttgctacattaagtatggactaactacccttatacatcagcacaa

SEQ ID NO: 34116 - DNA, 260 bp, Unknown
  Description of Unknown: RightRegion for integrase B8117 sequence
gagatacgtgttcacaagagtgttcgtcgtagccgaaaatacgatatcgattttttatagtttagttttacctctaatgaatagtatccgaccggaaactggccgggcaaaaccgtgtccaacgcccagggctggtgcaaaaccgggcgtcacgggtacgtgctggtggatattcccggaacctattccctgatggcccattccgctgaggaagaggtggccagaaatttcatctgcttcggcaaaagcgacgccgtggt

SEQ ID NO: 34117 - DNA, 260 bp, Unknown
  Description of Unknown: RightRegion for integrase B8118 sequence
tctatcatcaaagaaattcaagtagatcatcataaaaatattaacattgtttttctataaatatacgaaaagccgggaatttcccggcttttcataactttattttttatagtactaacttacactatccattaggtttaggtcctgcaatataatcacgttccttcataacaattaagtctgtttgactttttaaaatctcaacaagattatatatatcattgacaaaatagcaaataactcttgcacctgcaatatcc

SEQ ID NO: 34118 - DNA, 260 bp, Unknown
  Description of Unknown: RightRegion for integrase B8119 sequence
gaagaaattttagtagatcctgatacacgaaaaattaaagacgtgaaattgcttatataagaaaacaagggcagtattctatcttacacggtcgagttcgagcccttcgccaccacccttgaaaccgaaggaaatggcaccgttgttgcctcactcggcgtcgattccggttatgtcccctacaccgcctactgtgcaaagcagagctatctaaatgggcatccggaaattatccagtcgttcacgaatgccatccagaa

SEQ ID NO: 34119 - DNA, 196 bp, Unknown
  Description of Unknown: RightRegion for integrase B8120 sequence
atcattaaagcgatctatgttacaaaagatcgtaacgtggattatgtagattttttataggtctatatctgttgtactaactatatcgtgccatttggggcagataaaactatgactgccgtcatatccggcgaggcggacatcggatttatgggagcagaagcatctatctatgcctatcaggaaggagctactg

SEQ ID NO: 34120 - DNA, 109 bp, Unknown
  Description of Unknown: RightRegion for integrase B8121 sequence
aaagacaaaaaacataagacaaacacacttgatatcaacagtattcattttaaattttaatagcagttgtgtcactatttaggtggcacctgtaccacccatagttacc

SEQ ID NO: 34121 - DNA, 145 bp, Unknown
  Description of Unknown: RightRegion for integrase B8122 sequence
aaagataaaaaacataagacaaacacacttgatatcaacaatattcactttaaattttaatagcagttgtgtcactatttaggtctatcgtgtgacaaaactaacatacaaaaataccgtatctattaagatacggtttaatctc

SEQ ID NO: 34122 - DNA, 260 bp, Unknown
  Description of Unknown: RightRegion for integrase B8123 sequence
tctatcatcaaagaaattcaagtagatcatcataaaaatattaacattgtttttctgtaaatatacgaaaagccggggatttcccggcttttcataactttattttttcatagcactaacttacactatccattaggatagtgttagttagtgctatgaaattattatggcatcatcttcactacaaatgagtttttaaaagcatttctgttcactattattttatgattattttcaaatatttttatatatctcatcat

SEQ ID NO: 34123 - DNA, 260 bp, Unknown
  Description of Unknown: RightRegion for integrase B8124 sequence
agaatgttaataaatagaattacaatcaatgataacaatatcaatatagatttaaaatgatttttcgactaagtacaatcatcggaaccgcataggtggagaactttacgcccagtgcaggattgaagttgtcgatggatttgatcagaccgatgcatccaatctgaaagagatcatctacgttctcgtggttcccggaaaagcgcttgattacacttaagacgaggcggaggtttcccttgatgtaagtttcgcgggca

SEQ ID NO: 34124 - DNA, 260 bp, Unknown
  Description of Unknown: RightRegion for integrase B8125 sequence
tctatcatcaaagaaattcaagtaaatcatcataaaaatattaacattgtttttctataaatatacgaaaagccggggatttcccggcttttcataactttattttttatagcactaactgatactagccattaggtttaggtcctgcaatataatcacgttccttcataacaattaagtctgtttgactttttaaaatctcaacaagattatatatatcattgacaaaatagcaaataactcttgcacctgcaatatcc

SEQ ID NO: 34125 - DNA, 260 bp, Unknown; identical to SEQ ID NO: 34105
  Description of Unknown: RightRegion for integrase B8126 sequence

SEQ ID NO: 34126 - DNA, 260 bp, Unknown
  Description of Unknown: RightRegion for integrase B8127 sequence
attatagattctattgagtttgttaatgattacagattctatattcatttaaaattctaggaggaactatggggtttattctaactgaaaagatttttaatcattatagtaaaaaagaattaggagacattttgtctcctaaagtttttactcaattatctaccaatactaaaatcctgccttggttttcggaacttgcgaaagtgatagatataaaaaaaataggatatactttagaagattttaaacatgattatcca

SEQ ID NO: 34127 - DNA, 260 bp, Unknown
  Description of Unknown: RightRegion for integrase B8128 sequence
tctatcatcaaagaaattcaagtagatcatcataaaaatattaacattgtttttctgtaaatatacgaaaagccggggatttcccggcttttcataactttattttttcatagcactaactgacactatccattaggtttaggtcctgcaatataatcacgttccttcataacaattaagtctgtttgactttttaaaatctcaacaagattatatatatcattgacaaaatagcaaataactcttgcacctgcaatatc

SEQ ID NO: 34128 - DNA, 260 bp, Unknown
  Description of Unknown: RightRegion for integrase B8129 sequence
gaaaatattaatgtggatccgaaaacccgtagaataagcgggattaaattattgatttaagggcagtattcaatcttataccattgtgtaatgttttttactgccctcaattattctactgaagaagccccggccaccgcaacgccccatcctgatccggcgtaagcgttaccggctccacaaccatccggccctgatcgtccatgatgtaccacttgccgtcaatggtcttctggcctgttaccatcgctccgtcagtg

SEQ ID NO: 34129 - DNA, 260 bp, Unknown
  Description of Unknown: RightRegion for integrase B8130 sequence
atcattaaagcgatctatgttacaaaagatcgcaacgtggattatatagattttttatagaatctacatctgttgtactaactatatcgtaccatttggcgttatgcagttagtacaacactaattgcataacgaaactgggagagaaaggacaccaggttaaaaacgtgagggtgtcggcgagcctatcaaatgaatcgtcggggctttcgatctgcgtctatcaggtcgaaataacctcaggggttgaagaacgtgca

SEQ ID NO: 34130 - DNA, 147 bp, Unknown
  Description of Unknown: RightRegion for integrase B8131 sequence
atcattaaagcgatctatgttacaaaagatcgtaacgtggattatgtagattttttataggtctatatctgttgtactaactatatcgtgccatttggggcagataaaactatgactgccgtcatatccggcgaggcggacatcgga

SEQ ID NO: 34131 - DNA, 260 bp, Unknown
  Description of Unknown: RightRegion for integrase B8132 sequence
ctgatcggcgagttcgccccaaggggcatcggcgcggaactggtggaggtcgaagcctgatgaacgacacactggaaaccttcgtgccactgacattccgccgccggggcgcgcggcgcgtggccgccgacgaccgccatgttcacgatgtgacgttgctggagggggtggcacgcggtttctactggcagcacctcgtggacaccggcgagatgaagagtggctcggagatcgcccgggccgaaggcttacacccatcg

SEQ ID NO: 34132 - DNA, 260 bp, Unknown
  Description of Unknown: RightRegion for integrase B8133 sequence
agtattattgataaaatcatcatttcagacggtggagatattgagatagtatttttatgatgtttgttgtactatctcatacgctcctgtcggctcatctgcaagaagaatcgcaggctctccgactaatgctcttgcgattgccactctttgcttctgaccacccgaaagttcatttggtttatgatttatcctttccttaagaccgagcatttctatcgtatccatgcacatctcctgtgcctcttcatgctcatatc

SEQ ID NO: 34133 - DNA, 260 bp, Unknown
  Description of Unknown: RightRegion for integrase B8134 sequence
agtattattgataaaatcatcatttcagacggtggagatattgagatagtatttttatgatgtttgttgtactatctcatacgctcctgtcggtgcgttatagttagtacaacattgtgaccgaattggacacaaaagcggtaaaccttggattttcccttggtctaccgctttttatttacatcacttttgttaattcagttaattctttaaaaattctttccgcttcttgccctctaaagtctttcaatacaacttta

SEQ ID NO: 34134 - DNA, 160 bp, Unknown
  Description of Unknown: RightRegion for integrase B8135 sequence
attattaagaaaattgagattaacaatgacggtgaaatcaccggtatttttttcggctagtagtgtactaactgtacactacctgtaggtaatgtttaattagtacacactataaaagttaatattccctcccagattgccagtctgggaggatttttct

SEQ ID NO: 34135 - DNA, 139 bp, Unknown
  Description of Unknown: RightRegion for integrase B8136 sequence
agtattattgataaaatcatcatttcagacggtggagatattgagatagtatttttatgatgtttgttgtactaactataacgctcctgtcggctcatctgcaaatataatttccggacgattcaccagtgctcttgca

SEQ ID NO: 34136 - DNA, 260 bp, Unknown
  Description of Unknown: RightRegion for integrase B8137 sequence
gaaatacaggtacctaaaagcgtgaatcgtcatagaaagtataagataatacctttataatttagttttacctcttataagtattaaccgacaggaaactggccgggaaaaaccgtgaccaatgcccagggctactgtaagacaagagaacacagctacgtgctggtagatatccccggcacctactccctcatggcccactccacggaggaggaagtggcccgcaacttcatctgctttggcggaagcgacgggattgt

SEQ ID NO: 34137 - DNA, 260 bp, Unknown
  Description of Unknown: RightRegion for integrase B8138 sequence
agtattattgataaaatcatcatttcagacggtggagatattgagatagtatttttatgatgtttgttgtactatctcatacgttcctgttggctcatcagccaaaattaattcgggatttgttattatcgcacgtgccactgctgccctttgcttctgtcctcctgacacctcgtatggatatttattaagcagcttttcaattccaagcagcgaagctataggtgcaagccttttttccatatccctatagtccacac

SEQ ID NO: 34138 - DNA, 260 bp, Unknown
  Description of Unknown: RightRegion for integrase B8139 sequence
agtattattgataaaatcatcatttcagacggtggagatattgagatagtatttttatgatgtttgttgtactatctcatatgctcctgttggttcatctgccagaacaattgccggacggttgatcagtgcccgcccgatggatacgcgctgctgctgtccgccggagagttcttccggaagatgcgtttttcttccgttaagtcccagctcatcgatcagtttatccagacgctttttatccaccgtctgtccgtcaa

SEQ ID NO: 34139 - DNA, 260 bp, Unknown
  Description of Unknown: RightRegion for integrase B8140 sequence
agtattattgataaaatcatcatttcagacagcggagatattgagatagtatttttatgatgtttgttgtactaactataacgctcctgtaggttcatccgcaagaatgatcgccggatcatttgccatcgcgcgggcgatcgcaactctctgcttctgcccgccggaaagttcgtccggcgtatgtgacatgcgttccttcataccgaccacctctaacagttctgccgcccgttttgcccgcacctttttggagacgc

SEQ ID NO: 34140 - DNA, 260 bp, Unknown
  Description of Unknown: RightRegion for integrase B8141 sequence
gtgttgaaagagatccgtattgataatgaccagaatatcactggtatttcatttttttagcctattgttgtactaatgttacagaaccggtgggttgtgtaaacttagtataacaaatacaagccccagcatttctgccggggctttcttaatttccgcatatttgcggttatttcacatatacatctccatcataatatgctgcaatccatccagacggtaccagaatccagatatcactgcctacgttcttgacggcc

SEQ ID NO: 34141 - DNA, 260 bp, Unknown
  Description of Unknown: RightRegion for integrase B8142 sequence
ttaattagccaaatctcaatcgatggcgaacgaattgtagtaaaatggcgcgtaaaataaagaaaaaagcccgaaacatcggattttccgacgttttgggcttatattttatatgccttaatgaagtaacgctgtaaatattaacctcaaaaggcatacacggaaagcccaatccgtatatgccttttttgtttttattataactgaaaagtatttgtttgtcaatattcccccgaaagatttttacatcatatccgggt

SEQ ID NO: 34142 - DNA, 94 bp, Unknown
  Description of Unknown: RightRegion for integrase B8143 sequence
agtattattgataaaatcatcatttcagacggtggagatattgagatagtatttttatgatgtttgttgtactatctcatacgctcctgtcggc

SEQ ID NO: 34143 - DNA, 260 bp, Unknown
  Description of Unknown: RightRegion for integrase B8144 sequence
gaaatacaggtacccaaaagcgtgaatcgccataggaaatataagataatgcctttataattttgttttacctctaacacattgtaaccgacaggaaactggccgggaaaaaccgtgaccaatgcccagggctactgtaagacaagggaacacagctacgtgctggtagatatccccggcacctactccctcatggcccactccacggaggaggaagtggcccgcaacttcatctgctttggcggaagcgacggggttgt

SEQ ID NO: 34144 - DNA, 139 bp, Unknown
  Description of Unknown: RightRegion for integrase B8145 sequence
agtattattgataaaatcatcatttcagatagcggagatattgagatagtatttttatgatgtttgttgtactatcttatacgctcctgttggttcatccgctaaaactaatttaggctcattaataattgccctagca

SEQ ID NO: 34145 - DNA, 260 bp, Unknown
  Description of Unknown: RightRegion for integrase B8146 sequence
tcgggttcggatattgagggttttactccactaaaaaaacaagtcgaactttttgtatgaaggaatcatataagaagtccggcttgtttttggtaatgaagaaaattataatagaactgaatttaaaggaaaaaagtatatgacgttttgcggacgttattgtaggaaatgtctcagtgccataaatgaaaataaggagtgtgaaaactatgcaccagacaggacagatatacagaccgccatcagaagccagtgtacag

SEQ ID NO: 34146 - DNA, 142 bp, Unknown
  Description of Unknown: RightRegion for integrase B8147 sequence
agtattattgataaaatcatcatttcagacggcggagatattgagatagtgtttttatgatgtttgttgtactatcttatacgctcctgtcggttcgtcggcaagcacaactgccggtgcattcatcaatgctcttccaatg

SEQ ID NO: 34147 - DNA, 260 bp, Unknown
  Description of Unknown: RightRegion for integrase B8148 sequence
agtattattgataaaatcatcatttcagacggtggagatattgagatagtatttttatgatgtttgttgtactatctcatacgctcctgtaggctcatctgccaaaatcagggacggatccccggccaatgccctggctatagaaacacgctgctgctgaccgccagataactggtttggcatatttttccacttttctgccagacctaccttttccaaagaagccatagcacgcttctttcgctcctcacttcccactc

SEQ ID NO: 34148 - DNA, 260 bp, Unknown
  Description of Unknown: RightRegion for integrase B8149 sequence
agtattattgataaaatcatcatttcagacagcggagatattgagatagtatttttatgatgtttgttgtactatcttatacgctcctgtaggctcatcggcaagaatcaatgccgggcgatttgccagtgctcttgcgatcgctgcacgctgctgctgtccaccagataactggtttggaagatgcttccgtctgtccttcagacctaacatctcgataatatgatcgatgtaatcgcgatccggctttctgtgatcga

SEQ ID NO: 34149 - DNA, 260 bp, Unknown
  Description of Unknown: RightRegion for integrase B8150 sequence
tcagacggtctgcatttgaccttctgcttgaaggacggtactcaaattgaatataattaaaaaagacacacagccgtgaagctgtgcgccttgggattaacctttcttaacgagtccctggacgatggatgcaatgctatctaattgtttgtcgtccagtctctttaggtctttaataagctcgttcaatttttcagggttctttgcatcggtgtcaaagaagtccttgggagaaagctgtaaatattcgcagatataga

SEQ ID NO: 34150 - DNA, 260 bp, Unknown
  Description of Unknown: RightRegion for integrase B8151 sequence
agtattattgataaaatcatcatttcagacagcggagatattgagatagtatttttatgatgtttgttgtactatctcgcacgctcctgtgggttcatctgccagaagaatagccggttcagatgccaatgctctggcgatagatacacgctgcttctgtccaccagacaactcattgggtctgtggtcaagtctgtgatcaatacccaataatttcacgatatcctggcatttttcactggcttcccgatgtcccatgc

SEQ ID NO: 34151 - DNA, 260 bp, Unknown
  Description of Unknown: RightRegion for integrase B8152 sequence
gcgggagtcgaagtttatccccccttgcgggggaaatcccttcaggtccaccaaaaataagccccccgcagaggtggctttatttttgtcgtgggcctagggattcgaggtttatgccctgaaagggtaaatcccttcagacctaccaggcattcagaaccatctggaaattggattattctgaattttcctttcggttgaagaaaacagctactctcgtttatgcaaaatcagaagcactcgactactacataagtcaa

SEQ ID NO: 34152 - DNA, 139 bp, Unknown
  Description of Unknown: RightRegion for integrase B8153 sequence
agtattattgataaaatcatcatttcagacagcggagatattgagatagtatttttatgatgtttgttgtactatcttatacgctcctgtcggctcatctgcaaatataatttccggacgattcaccagtgctcttgca

SEQ ID NO: 34153 - DNA, 89 bp, Unknown
  Description of Unknown: RightRegion for integrase B8154 sequence
agtattattgataaaatcatcatttcagacggtggagatattgagatagtatttttatgatgtttgttgtactatctcatacgctcctg

SEQ ID NO: 34154 - DNA, 187 bp, Unknown
  Description of Unknown: RightRegion for integrase B8155 sequence
agtattattgataaaatcatcatttcagacggcggagatattgagatagtatttttatgatgtttgttgtactatctcatacgctcctgtcggttcatcggcaaggatcatttggggatgtaagatcagagcccttgctgccgcaacacgctgacgctggccaccggacatcttggacggaaactta

SEQ ID NO: 34155 - DNA, 260 bp, Unknown
  Description of Unknown: RightRegion for integrase B8156 sequence
agtattattgataaaatcatcatttcagacagtggagatattgagatagtatttttatgatgtttgttgtactatctcatacgctcctgtaggttcatctgccaaaacaacagaacattttttcatcataagacgagctaaagcaactctctgttgttcaccaccggaaagctgataaacttttttgttaacttcctttgataaccccacacgattaagagcttctttaagtgatactttagttcggcttgattttttaa

SEQ ID NO: 34156 - DNA, 260 bp, Unknown
  Description of Unknown: RightRegion for integrase B8157 sequence
agtattattgataaaatcatcatttcagacggtggagatattgagatagtatttttatgatgtttgttgtactatctcatacgctcctgttggctcatctgccaaaataatatcggggtcggaaatcaaactgcgggcggcagcgacgcgctgtttttgaccacctgacatctgcaccggaaatttggagagcacatccgtgattccaaaaagtcctgcaatgtcattcaacttcttctccgcagcagatatatctacat

SEQ ID NO: 34157 - DNA, 260 bp, Unknown
  Description of Unknown: RightRegion for integrase B8158 sequence
agtattattgataaaatcatcatttcagacggtggagatattgagatagtatttttatgatgtttgttgtactatctcatacgctcctgtaggttcatccgccaaaatcagtttgggctttgtgattaacgcccgtccaatggcgacacgctgctgctgtccgccggatagttgatttggcaggtggtgccgacgttcggtaaggcccaagagatccaagatttcttctaccgctgccggatctggcttgcgatagtcca

SEQ ID NO: 34158 - DNA, 260 bp, Unknown
  Description of Unknown: RightRegion for integrase B8159 sequence
agtattattgataaaatcatcatttcagacagcggagatattgagatagtatttttatgatgtttgttgtactatctcatacgctcctgtgggctcatctgccagaataatctgagggttagtaataagagctctcgcaaccgctgccctctgcttctgtccacctgacacctcatatgggaactttcctaatatagactcaattcccagctcctttgcaattggcttaagcttctcttgcatgctatcatacttctccc

SEQ ID NO: 34159 - DNA, 260 bp, Unknown
  Description of Unknown: RightRegion for integrase B8160 sequence
agtattattgataaaatcatcatttcagacagtggagatattgagatagtatttttatgatgtttgttgtactatcttatacgctcctgtcggctcatctgcaaatataatttccggacgattcaccagtgctcttgcaattgctactctctgctgctgtcctccggataactgatttggcagattataaatccggttttcaatccccagagttgcaatgatatcatttacatacgcttcatccacttttcttccatcca

SEQ ID NO: 34160 - DNA, 260 bp, Unknown
  Description of Unknown: RightRegion for integrase B8161 sequence
agtattattgataaaatcatcatttcagacggtggagatattgagatagtatttttatgatgtttgttgtactatctcatacgctcctgtaggctcatcacataaaatggcttccggagatactgcaagcgcccttgcgattgcaactctttgttgttcaccgccggacaaattgattgggtaatcattttccttgctttctaagccgacactttttagcaagcctgtaattatctcgtgacgctgtttggcggtaaacg

SEQ ID NO: 34161 - DNA, 260 bp, Unknown
  Description of Unknown: RightRegion for integrase B8162 sequence
agtattattgataaaatcatcatttcagacggtggagatattgagatagtatttttatgatgtttgttgtactatctcatacgctcctgtcggttcatcagcaaggataatcgcaggcttcgtaattaaagctcgtgcaatcgctacacgttgctgttgaccgcctgaaagattgttcggcatattttccagtttatcttctaaagccaacatatacacaacttcgtccataaatttctggtctactgtatcgccatcca

SEQ ID NO: 34162 - DNA, 260 bp, Unknown
  Description of Unknown: RightRegion for integrase B8163 sequence
gtgctgaaagagatccgtattgataatgaccagaatatcactggtatttcatttttttagcctattgttgtactaatattacagagccggtgggttgtgtaaacttagtataacaaatacaagccccagcatttctgccggggctttcttaatttccgcatatttgcggttatttcacatatacatctccatcataatatgctgcaatccatccagacggtaccagaatccagatatcactgcctacattcttgacggcc

SEQ ID NO: 34163 - DNA, 260 bp, Unknown
  Description of Unknown: RightRegion for integrase B8164 sequence
agtattattgataaaatcatcatttcagacggcggagatattgagatagtgtttttatgatgtttgttgtactatctcatacgctcctgttggctcatctgccaagatcaacgcaggttcatttgcaatcgctctagcaattgcaacgcgctgcttctgacccccggaaagattactcacaggcttatcgacaaaatcttgcatctgcaccatttcaagcattttgcgcgcgatttctttcctgtcttttttccgttttt

SEQ ID NO: 34164 - DNA, 260 bp, Unknown
  Description of Unknown: RightRegion for integrase B8165 sequence
agtattattgataaaatcatcatttcagacggcggagatattgagatagtatttttatgatgtttgttgtactatctcatacgctcctgtaggtgcgttatagttagtacaacattgtgaccgaatcggacacaaaaggcggtaagccttgatttctcttgacttaccgccttttttaattactcttccgacacatacacatcaaaatcctcttcattgtagctttctccgtattctgccagttctacccaacttgcaca

SEQ ID NO: 34165 - DNA, 260 bp, Unknown
  Description of Unknown: RightRegion for integrase B8166 sequence
aggatgattattaataaaatcactatcacagataataatatcaatgttgattttaaataatttcgactaggtacattcatcggcacggcatatgtggaaaattttacccccatatccgggttaaagttatcaatggatttgatcagaccgatacatccgatctgaaacaggtcatctacattttcattgtgattcgaaaaacgtttgatgacacttaaaacgagccgcagatttcccttaatgtaagtttccctggcagc

SEQ ID NO: 34166 - DNA, 109 bp, Unknown
  Description of Unknown: RightRegion for integrase B8167 sequence
tcttttatcgattgtatatatgtggatgataaaagaaatttccgtgttaaatttttgtaattatgcatatggtactaactgcgcttgacctgtattgagcgcctgcagc

SEQ ID NO: 34167 - DNA, 142 bp, Unknown
  Description of Unknown: RightRegion for integrase B8168 sequence
agtattattgataaaatcatcatttcagacagcggagatattgagatagaatttttatgatgtttgttgtactatcttatacgctcctgttggttcgtctgctaatacaatcgaacatttctttagcattaaacgagctaac

SEQ ID NO: 34168 - DNA, 260 bp, Unknown
  Description of Unknown: RightRegion for integrase B8169 sequence
agtattattgataaaatcatcatttcagacagcggagatattgagatagtatttttatgatgtttgttgtactatcttatacgctcctgtgggtgcgttatagttagtacaacattgtgaccgaatcggacacaaaaggcgataagccttgattcctcttgacttaccgcctttttgttttacttcatttcttccaaaaattcctcttctgtctgatattcgcactcggttaataccaatgttgtaaaaaggctttccgt

SEQ ID NO: 34169 - DNA, 260 bp, Unknown
  Description of Unknown: RightRegion for integrase B8170 sequence
agtattattgataaaatcatcatttcagacggtggagatattgagatagtatttttatgatgtttgttgtactatctcatacgctcctgtaggctcatctgccagaatatattttgcatctgttatcaacgccctcgctattgcaactctttgctgctgtccacctgacaattccgtaacctttcgggttatctgactatcatcaagtccaaccagtacaagactgtctctacacattttaatcaattcttttttaggta

SEQ ID NO: 34170 - DNA, 260 bp, Unknown
  Description of Unknown: RightRegion for integrase B8171 sequence
agtattattgataaaatcatcatttcagacggtggagatattgagatagtatttttatgatgtttgttgtactatctcatacgctcctgtaggctcatcagcaagaataagcttcggattagtaataatggctcttgcacttgccactctctgcttctgtccgcctgacatctgataaggatatttgtttaatacatcttcaatgccaagctctcttgcagtctgtcttactcttaattcaatctcccttgccggaacat

SEQ ID NO: 34171 - DNA, 260 bp, Unknown
  Description of Unknown: RightRegion for integrase B8172 sequence
agtattattgataaaatcatcatttcagacggtggagatattgagatagtatttttatgatgtttgttgtactatctcatacgctcctgtcggctcatctgcaaatataatttccggacgattcaccagtgctcttgcaattgctaccctctgctgctgtcctccggataactgatttggcagattataatccggttttcaatccccagagttgcaatgatatcatttacatacgcttcatccacttttcttccatccag

SEQ ID NO: 34172 - DNA, 139 bp, Unknown
  Description of Unknown: RightRegion for integrase B8173 sequence
agtattattgataaaatcatcatttcagacagcggagatattgatatagtatttttataatgtttgttgtactatctcgcacgctcctgtcggctcatctgcaaatataatttccggacgattcaccagtgctcttgca

SEQ ID NO: 34173 - DNA, 260 bp, Unknown
  Description of Unknown: RightRegion for integrase B8174 sequence
agtattattgataaaatcatcatttcagacggtggagatattgagatagtatttttatgatgtttgttgtactatctcatacgctcctgtcggttcatcagctaaaatcagtttcggttcattgattaaggctctagcacaagcacaacgctgtttttgtccgccagaaacttcataaggaaatttcgataaaatatcacgaatacccaatttatcggcgatagcatgaactcttttctcaatatcagtagggttctgtt

SEQ ID NO: 34174 - DNA, 260 bp, Unknown
  Description of Unknown: RightRegion for integrase B8175 sequence
attattaaaaagattgagattaacaatgacggtgaaatcaccggtatttttttcggctaatggtgtactaactgtacactgccggtaggttcatcggccagcacaattgcaggcttagcaaccagagctcttgctattgcaaccctctgctgctgtcctccagagagattattcggcatattctttagtttatcttccagagccagcatatgaaccacctcatccataaacccctgatctaccgtatctccatccaattc

SEQ ID NO: 34175 - DNA, 260 bp, Unknown
  Description of Unknown: RightRegion for integrase B8176 sequence
agtattattgataaaatcatcatttcagacggtggagatattgagatagtatttttatgatgtttgttgtactatctcatacgctcctgtaggctcatcagctagtattattggagcatctgataccaatgctctggcaatagctactctttgctgctgtccaccagataatttcataacatttctttttatttgttttttatctaagcccagttcaaacaagataccttcatctgctgatttattcaccaatctaatat

SEQ ID NO: 34176 - DNA, 260 bp, Unknown
  Description of Unknown: RightRegion for integrase B8177 sequence
gaaatacaggtacctaaaagcgtgaatcgtcatagaaagtataagataatacctttataatttagttttacctcttataagtattaactgacaggaaactggccgggaaaaaccgtgaccaatgcccagggctactgtaagacaagagaacacagctacgtgctggtagatatccccggcacctactccctcatggcccactccacggaggaggaagtggcccgcaacttcatctgctttggcggaagcgacgggattgt

SEQ ID NO: 34177 - DNA, 260 bp, Unknown
  Description of Unknown: RightRegion for integrase B8178 sequence
gtgattaaggaaatccgaataaataaaacaaaagaaatcgttggtattttttttgcgtaaagttgtactaatgttacactgccctcaggtaatgtcgagttagtacaaccaataacaacttaacattttaggcaaaagaaaaaggcaccgagtcgttacgctcgatgccttaaaatagcttttgatgcctttacttttttgtgtaatcaaggcttatccacccagctccggactttaatttgccccacgttgatgctcct

SEQ ID NO: 34178 - DNA, 260 bp, Unknown
  Description of Unknown: RightRegion for integrase B8179 sequence
agtattattgataaaatcatcatttcagacagcggagatattgagatagtatttttatgatgtttgttgtactatcttatacgctcctgtcggttcatcagccaggacgattgcaggctttgacaccaaagcgcgggcaatggctacgcgctgctgctggccgccggaaaggttattgggcatattgttcagcttatcctccagccccagcatctgaacgacttctttcataaacttcttgtctaccttgtttccgtcca

SEQ ID NO: 34179 - DNA, 260 bp, Unknown
  Description of Unknown: RightRegion for integrase B8180 sequence
gaaatacaggtacccaaaagcgtgaatcgccataggaaatataagataatgcctttataattttgttttacctctaatacattgtaaccgacaggaaactggccgggaaaaaccgtgaccaatgcccagggctactgtaagacaagagaacacagctacgtgctggtagatatccccggcacctactccctcatggcccactccacggaggaggaagtggcccgcaacttcatctgctttggcggaagcgacgggattgt

SEQ ID NO: 34180 - DNA, 260 bp, Unknown
  Description of Unknown: RightRegion for integrase B8181 sequence
agtattattgataaaatcatcatttcagacggcggagatattgagatagtttttttatgatgtttgttgtactatcttatacgctcctgttggctcatctgccaaaattaattcgggatttgttattatcgcacgtgccactgctgccctttgcttctgtcctcctgacacctcgtatggatatttattaagcagcttttcaattccaagcaatgaagctataggcgcaagccttttttccatatccctatagtccacac

SEQ ID NO: 34181 - DNA, 260 bp, Unknown
  Description of Unknown: RightRegion for integrase B8182 sequence
aacaccgctacgctctcgtgttcggatatagcgtgttttgaaaacaccattgacatctgaacccccaaggttcggacatcaatggtgtttttcttgtttcctttgatttataagggattcagggcttcaaggagcaatctccttttcggacattcttgataaatcgttgaattttaggccgtaaaacagcgaaaacaatcaatatgaacccctttgttcaggacatggtctctggctccctttgctcgccaaaatagata

SEQ ID NO: 34182 - DNA, 260 bp, Unknown
  Description of Unknown: RightRegion for integrase B8183 sequence
ggcggagaagtgttcgtccgctgcgcgccatgctccaccaaaatgttcggaattttttgatttttgcagaagattccgaacttttttgtatttttcaaaatcaggcactctccacagtcgcaattttgccgccattcggttcgcatcccacacaaagccgtctgaaatcctcaaaggaaacccgaaactcgacttccaaacggtaatcccggtacacatagacggccttgataagttgcgatacgatcatcttctttgct

SEQ ID NO: 34183 - DNA, 260 bp, Unknown
  Description of Unknown: RightRegion for integrase B8184 sequence
gaatatgtaaaacttaaaaacaggcattctattaaaataaacgatatagaattttattaacttacgtacggaagtatagacactctattaatacttaatgtgtatacttccgtaaatttataaagaaagaccacacccattaaggaatagtctttaaaaaatattatatcttttaattgaaaatcaaaaattattttttatcagaaccctattttcccttcatcatcatctacaaatttaacttcatcaatttctgtatt

SEQ ID NO: 34184 - DNA, 260 bp, Unknown
  Description of Unknown: RightRegion for integrase B8185 sequence
gattatgtaaaacttaaaaacaggcactccattgaaataaaagatatagaattttattgatataagtacggaagtatagacactcgattaatatcggatgtataccgactaaaacattaattcatgatggtattgaaggtagttcattcaaagaggctattactagaaaaaaagaagtcgtacaggcattgaataacaagaactatcaaggcttaaattcaaaggacaatatagatgttctaaattataaagctaatttt

SEQ ID NO: 34185 - DNA, 260 bp, Unknown
  Description of Unknown: RightRegion for integrase B8186 sequence
gtgctggatcgcgtaaccgtctccgccgcccgggacatccgatttaccctggcactctgattttttgcaaaaaacgacctggaacccaccgttccaggtcgttttcctcacttcctatttctgtagggtactacttccaaccaatacccatccggatcattgataaaataaacccccatggcctcgttgccgtagcagacacagcccatcttgctgtgcttctcgtaggcggcggggtagtcatctactcggaaggccag

SEQ ID NO: 34186 - DNA, 260 bp, Unknown
  Description of Unknown: RightRegion for integrase B8187 sequence
gtcatcaaggagatccgcctctatccggaccgccatatagagtttgacctaaacctataagctgcgattttttccgcgcaaaataattacacaagatatatccatctgtggaaggactcagatagattttcggcatgggcattctcctttcctggtcattctatgccaaaataccggctctgcgcactggtaatttcccagcatatgtgatacaatagaggctgttgaaaaactcggaagtcttccgccatcggaaagga

SEQ ID NO: 34187 - DNA, 260 bp, Unknown
  Description of Unknown: RightRegion for integrase B8188 sequence
cataagctcttaaagggcataaccgttgaaaagactcacgttacgggtcttattttttaaaagactgctgtaccctctaacgctacatacccaaatggctgtgtatcgttagagggtacacaacccgtttatgataacacgggaaatgatcgatagcaaggagacaatgaaagcaaaatgccctcagctgtatgttcaggctgagggcataacatttactttgtgaagtatttagctactttataaggctttgcgtccgc

SEQ ID NO: 34188 - DNA, 81 bp, Unknown
  Description of Unknown: RightRegion for integrase B8189 sequence
attgaaaaaatcgaagtcgtcggcggtgacatgaatgtctatttttttgacaccaaataaacattggttagtaccaacgta

SEQ ID NO: 34189 - DNA, 260 bp, Unknown
  Description of Unknown: RightRegion for integrase B8190 sequence
tcggggaacaacaccctcactatcgagtgttcggatattgagggcatagctccaccataaggtggcaacaattcggatattttaagcgaaacgcttagaataccaaagggttgccgcctttttttatttcaaattctgcactcagaaaaaaagatattttcacgttattttggtaactggggagattcgaactccccctttcacagattcaaaggtaaaatcctgagaagcgccctttttgcgggcgcagaatagagcga

SEQ ID NO: 34190 - DNA, 260 bp, Unknown
  Description of Unknown: RightRegion for integrase B8191 sequence
gagtatgtagagcttaagaataggcattccattgaaataaaagagatagaattttattaacatatgtacggaagtatagacacttgattaatatttaatgtgtatacttccgtatttttgtttatagaacccgtcgaattcgacgggttttgattatccgtgtcgaaatcgaggcgtttgaaataaaaaaccaccacactcaaaagaatgtggtagcaaaaattataaaggagtaaaaaagattaaattgtatgtaattt

SEQ ID NO: 34191 - DNA, 260 bp, Unknown
  Description of Unknown: RightRegion for integrase B8192 sequence
gagtatataaaacttaagaacagacattccattgaaataaaagatatagaattttattgatataagtacggaagtatagacactcgattaatatcggatgtataccgactaaaacattaattcatgatggtattgaaggtagttcattcaaagaggctattactagaaaaaaagaagtcgtacaggcattgaataacaagaactatcaaggcttaaattcaaaggacaatatagatgttctaaattataaagctaatttt

SEQ ID NO: 34192 - DNA, 109 bp, Unknown
  Description of Unknown: RightRegion for integrase B8193 sequence
gtcatcaaggagatccgcctctatccggaccgccatatagagtttgacctaaacctataagctgcgatttttacgcgcaaaataattacacaagatatatccatctgtg

SEQ ID NO: 34193 - DNA, 260 bp, Unknown
  Description of Unknown: RightRegion for integrase B8194 sequence
aaggaaatctatattgacaaggaaagccgccaaatatgcggttttaaatttctgctctagggtgtagtaacatatattacactgttgagtaataatttttactacacctcatagtgtaattgcttatgcttctctccttgtataaatagcgatttaggtgggtatgagtttgatacgataaacggagtccccagttataaggcaggtgcagatgcagcatgggtcccatttaagcgggagccaataattgaaaaagcttc

SEQ ID NO: 34194 - DNA, 109 bp, Unknown
  Description of Unknown: RightRegion for integrase B8195 sequence
gattatgtaaaacttaagaacaggcattccattgaaataaaagatatagaattttattaacatatgtacggaagtatagacactcgattaatatcggatgtataccgac

SEQ ID NO: 34195 - DNA, 260 bp, Unknown
  Description of Unknown: RightRegion for integrase B8196 sequence
cataagctcttaaagggcataaccgttgaaaagactcacgttacgggtcttattttttaaaagacagctgtaccctctaacgctacatagccaaatggctttgtagcgttagaaggtacaccccaaaacgcgacccgtttatgataacacgggcggagaacgatagcaaggagacaaaatagaagatgccctcagcaatgacagactgctgagggcaaatgtttactttgtgaagtatttagctactttataaggcttag

SEQ ID NO: 34196 - DNA, 260 bp, Unknown
  Description of Unknown: RightRegion for integrase B8197 sequence
attataaaagaaatggttctcgatgataatggacacgttacaagtctttcgtttgtctaaacgtttactaacacactataacccgtttgttctgatagtacatcaagactcatgcccttggaagttcgaattctttttaggttgacagctacattgtgagataggtatgattgataatccataggagactcctttttgcttttattatcagtttcttcatttctgcgtgttctaatgcaagcattattactatccttatg

SEQ ID NO: 34197 - DNA, 260 bp, Unknown
  Description of Unknown: RightRegion for integrase B8198 sequence
cataagctcttaaagggcataaccgttgaaaagactcacgttacgggtcttattttttaaaagacagctgtaccctctaacgctacatatccaaatggctgtgtagcgttagagggtacgcaacccgtttatgataacacgggaaatgaccgatagcaaggagacaaaaatggacgcattaaataagttagatactttagacaggataatcataggtactaaggacaaaatagagcatataatcagctggtacgcgcggg

SEQ ID NO: 34198 - DNA, 260 bp, Unknown
  Description of Unknown: RightRegion for integrase B8199 sequence
aaggaaatttatgtggataaagacagccgccagatatgcggttttatatttatgttatagggtgtagtaacgcatattactgcgtggtgtattattaattactacaccaatcaaatctataaggaggaaaagtatgattttacatgatttgtattatgcttgcggagacatggattgcactcataaagcaatcttaacctttggagatcgaactactttggaaatttccgtaggagaggccgtggatagatatggacatt

SEQ ID NO: 34199 - DNA, 260 bp, Unknown; identical to SEQ ID NO: 34190
  Description of Unknown: RightRegion for integrase B8200 sequence

SEQ ID NO: 34200 - DNA, 260 bp, Unknown
  Description of Unknown: RightRegion for integrase B8201 sequence
attataaaagaaatggttctcgatgataatggacacgttacaagtctttcgtttgtctaaacgtttactaactcactataacccgtttgttcggagaggacgtcaaggctcatgcctttggaggttcggattctttttaggttgacggctacgttgtgggataggtatgattggtaatccatatcgaaagctcctctcttttttattttttattattacactgttttagtctaattttcaatctatttttcatattatac

SEQ ID NO: 34201 - DNA, 260 bp, Unknown
  Description of Unknown: RightRegion for integrase B8202 sequence
gagtatgtaaaaattaaaaacaggcattctattaaaataagcgatatagaattttattaacttatgtacggaagtatagacactcgattaatatttaatgtgtatacttccgtatttttatttatagaacccgtagaattcgtcgagtttagattatccgtgtcgaaatcgaggcgtttgaaattaaaaaacaaccacgcccattaagaacgtggtttagaatatagtattaatttaaaattgggaacaaagattattat

SEQ ID NO: 34202 - DNA, 260 bp, Unknown
  Description of Unknown: RightRegion for integrase B8203 sequence
cataagctcttaaagggcataaccgttgaaaagactcacgttacgggtcttattttttaaaagacagctgtaccctctaacgctacatatccaaatggctgtgtagcgttagagggtacgcaacctgtttatgatagcacgagaaacggtcgatagcaaggagacaaaaatggacgcattaaataagttagatactttagacaggataatcataggtactaaggacaaaatagagcatatagttagttggtacgcaaggg

SEQ ID NO: 34203 - DNA, 260 bp, Unknown
  Description of Unknown: RightRegion for integrase B8204 sequence
cataagctcttaaagggcataaccgttgaaaagactcacgttacaggtcttattttttaaagatacttttataccctctaacgctacatacccaaatggctgtgtagcgttagagggtacgcaacccgtttatgataacacgggaaatgaccgatagcaaggagacaaaaaatggacacattaaataagttagatactttagacaggataatcataggtactaaggacaaaatagagcatataatcagctggtacgcgcg

SEQ ID NO: 34204 - DNA, 260 bp, Unknown
  Description of Unknown: RightRegion for integrase B8205 sequence
cataagctcttaaagggcataaccgttgaaaagactcacgttacgggtcttattttttaaaagacagctgtaccttctaacgctacatatccaaatggctgtgtatcgttagagggtacgcaacccgtttatgataacacgggaaatgaccgatagcaaggagacaaaaatggacgcattaaataagttagatactttagacaggataatcgtaggtactaaggaaaaaatagaacatataatcagctggtacgcgcggg

SEQ ID NO: 34205 - DNA, 260 bp, Unknown
  Description of Unknown: RightRegion for integrase B8206 sequence
acacaattaattgaacggattaccatcacggatgaagatatcgaaattactttaaaataaattgcagatttacaaatcccatgcacatgggctttgtaaatttgtaatagaaaattaccccggagttttgacgccccggggccttgatgatgctgttatgataatcccagcaacttgctccaagtctttggtccaacgatgccatccacaacaagccccatcgcccgctgaaatgccataattgccgcttttgtctttac

SEQ ID NO: 34206 - DNA, 260 bp, Unknown
  Description of Unknown: RightRegion for integrase B8207 sequence
aaggaaatctatgtggataaagatagccgtcagatatgcggttttaaatttttgctctagggtgtagtaacatatattactgcgtagaatttgaaccacatgccaccgccctggaagccaaaggcgacggttacgtggtagcatctctgggcgaggattccggatatgtcccttacaccgctttttccgcgaaaaagggctatattgaggcgcatcccgacgtaatccagtccttcaccaacgccctccagaagggtatg

SEQ ID NO: 34207 - DNA, 260 bp, Unknown
  Description of Unknown: RightRegion for integrase B8208 sequence
gtcatcaaggagatccgcctctatccggaccgccatatagagtttgacctaaacctataagctgcgattttttccgcgcaaaataattacacaagatatatccatctgtagatgggtatatcttgtgtaacttttcggcacgaccaaggccccggggaactccccggggccttgctattacttcttccccttcaccacaaacccggtgaaccccgccgctttcagcttttccagcatcctgtcggcgttggcgcggacgg

SEQ ID NO: 34208 - DNA, 260 bp, Unknown
  Description of Unknown: RightRegion for integrase B8209 sequence
gattatgtaaaacttaaaaacaggcattctattaaaataaacgatatagaattttattaacttatgtacggaagtatagacacttgattaatatcggatgtataccgactaaaacattaattcatgatggtattgaaggtagttcattcaaagaggctattactagaaaaaaagaagtcgtacaggcattgaataacaagaactatcaaggcttaaattcaaaggacaatatagatgttctaaattataaagctaatttt

SEQ ID NO: 34209 - DNA, 260 bp, Unknown
  Description of Unknown: RightRegion for integrase B8210 sequence
acgttgataaagagaatatatataaacggcaatagagttgaacatgttgagtttaattaatgcctgttgaataagacatataagatatattacccacctaaacggtgggtttcgttttgccaatgatgtgtatggcttaacacaccctcttctgtcgatggggtacggtaaagccatacatatgaaacccgcgccacataagggttttgataaaccaggatgtataattgttatctacacattggcatttagactaatta

SEQ ID NO: 34210 - DNA, 260 bp, Unknown
  Description of Unknown: RightRegion for integrase B8211 sequence
gattatgtaaaacttaaaaacaggcattctatcaaaataaatgatatagaattttattaacttatgtacggaagtatagacactcgattaatatttaatgtgtatacttccgtaaaaataaccacgctcataaagaacgtggtagcaaaatttataaaggagtaaaaaagattaaattgtatgtaatttaattgtagcacagaccgtgtaaccaatgtagtgttaaactatgtttttttaatatcaatctatcatctaca

SEQ ID NO: 34211 - DNA, 260 bp, Unknown
  Description of Unknown: RightRegion for integrase B8212 sequence
attataaaagaaatggttctcgatgataatggacacgttacaagtctttcgtttgtctaaacgtttactaacacactataacccgtttgttctgatagtacatcaagactcatgcccttggaagttcgaattctttttaggttgacagctacattgtgagataggtatgattgataatccatagaagactcctttttgcttttattatcagtttcttcatttctgcgtgttctaatgcaagtattattactatccttatg

SEQ ID NO: 34212 - DNA, 260 bp, Unknown
  Description of Unknown: RightRegion for integrase B8213 sequence
gattatgtaaaacttaaaaacaggcattctattaaaataaacgatatagaattttattaacttatgtacggaagtatagacactctattaatatttaatgtgtatacttccgtaaaaaataaccacgctcaaatgaacgtggtttagaatatagtattaatttgaaatagggaacaaagattattatacaataaaaaagagggtagccatagtgactacccttgtataatgacgtggtaacttaattatatcaaactgca

SEQ ID NO: 34213 - DNA, 260 bp, Unknown
  Description of Unknown: RightRegion for integrase B8214 sequence
gattatgtaaaacttaaaaacaggcattctattaaaataaacgatatagaattttattaacttatgtacggaagtatagacactcgattaatatttaatgtgtatacttccgtaaaaaaaccacgctcataagaacgtggttgctttttgtttattcaattacgccgattgctttagcacattctttaaatgtgtcataaccttttaaaacaactttgatatagtcttttgcatcttgctcattttcaaagaatatactt

SEQ ID NO: 34214 - DNA, 260 bp, Unknown
  Description of Unknown: RightRegion for integrase B8215 sequence
aaatatgtaaaacttaaaaataggcattctattaaaataagcgatatagaattttattaacttatgtacggaagtatagacactcgattaatatcggatgtataccgactaaaacattaattcatgatggtattgaaggtagttcattcaaagaggctattactagaaaaaaagaagtcgtacaggcattgaataacaagaactatcaaggcttaaattcaaaggacaatatagatgttctaaattataaagctaatttt

SEQ ID NO: 34215 - DNA, 260 bp, Unknown; identical to SEQ ID NO: 34203
  Description of Unknown: RightRegion for integrase B8216 sequence

SEQ ID NO: 34216 - DNA, 109 bp, Unknown
  Description of Unknown: RightRegion for integrase B8217 sequence
gagtatgcaaagcttaagaacagacattccattgaaataaaagatatagaattttattgatataagtacggaagtatagacactcgattaatatcggatgtataccgac

SEQ ID NO: 34217 - DNA, 260 bp, Unknown
  Description of Unknown: RightRegion for integrase B8218 sequence
aaactgattaaggagataaagcttgatggtaagcagattaagagggtcatatttttttaagtaatcgtcaggtgtatctggacgttatcaactgacggcgtccggttacaccggaaaaaataaaaggaggtgtgtgaagtgaagacttacaagtttaagaacgctactattaatgttatcggtgaggtaaaccgagaatgtttggagaaggcgacgatagaattggtgaaagctgctaggaaagcaaaagagaagaaaga

SEQ ID NO: 34218 - DNA, 260 bp, Unknown
  Description of Unknown: RightRegion for integrase B8219 sequence
cataagctcttaaagggcataaccgttgaaaagactcacgttacgggtcttattttttaaaagactgctgtaccctctaacgctacatacccaaatggctgtgtatcgttagagggtacgcaacccgtttatgataacacgggaaatgatcgatagcaaggagacaatgaaagcaaaatgccctcagccggaacatacagctgagggcacgatatttactttgtgaagtatttagctactttataaggctttgcgtccgc

SEQ ID NO: 34219 - DNA, 260 bp, Unknown
  Description of Unknown: RightRegion for integrase B8220 sequence
gagtatgtaaagcttaaaaacaggcattctattaaaataaacgatatagaattttattaacgtgtgtacggaagtatagacactcgattaatatcggatgtataccgactaaaacattaattcatgatggtattgaaggtagttcattcaaagaggctattactagaaaaaaagaagtcgtacaggcattgaataacaagaactatcaaggcttaaattcaaaggacaatatagatgttctaaattataaagctaatttt

SEQ ID NO: 34220 - DNA, 260 bp, Unknown
  Description of Unknown: RightRegion for integrase B8221 sequence
aaggaaatctatgtggataaagatagccgtcagatatgcggttttaaatttttgctctagggtgtagtaacatatattactgcgtagaatttgaaccacatgccaccgccctggaagccaaaggcgatggttacgtggtagcatctctgggcgaggattccggatatgtcccttacacggctttttccgcgaaaaagggctatattgaggcgcatcccgacgtaatccagtccttcaccaacgccctccagaagggtatg

SEQ ID NO: 34221 - DNA, 260 bp, Unknown
  Description of Unknown: RightRegion for integrase B8222 sequence
gagtatgtaaagcttaaaaacaggcattctattaaaataaacgatatagaattttattaacgtgtgtacggaagtatagacactcgattaatatcggatgtatacctactaaaacattaattcatgatggtattgaaggtaattcattcaaagagtctattactagaaaaaaagaagtcgtacaagcattgaataacaagaactatcaaggcttaaattcaaagaacaatatagatgttctaaattataacgccaaattt

SEQ ID NO: 34222 - DNA, 260 bp, Unknown
  Description of Unknown: RightRegion for integrase B8223 sequence
attataaaagaaatggttctcgatgataatggacacgttacaagtctttcgtttgtctaaacgtttactaagttattataacccgtttgttctgatagtacatcaagactcatgcccttggaagttcgaattctttttaggttgacagctacattgtgagataggtatgattgataatccatagaagactcctttttgcttttattatcagtttcttcatttctgcgtgttctaatgcaagtattattactattcttatg

SEQ ID NO: 34223 - DNA, 149 bp, Unknown
  Description of Unknown: RightRegion for integrase B8224 sequence
aataaaacagtcaacagtcctaacgaggttaagattaaagatgtttcatttttattgtagtgtgtggtattagcattttgattgtgatttaacatacaaaaccacacaaaaaaagcccacctaacttaataggtgggtcttgttatgta

SEQ ID NO: 34224 - DNA, 109 bp, Unknown
  Description of Unknown: RightRegion for integrase B8225 sequence
attattgataaaattattataggtaataatcgtaatgatataacaattcattttttataattattagttatattatttatatatatccagtaggtccatttactataac

SEQ ID NO: 34225 - DNA, 260 bp, Unknown
  Description of Unknown: RightRegion for integrase B8226 sequence
gagtatgtagagcttaagaataggcattccattgaaataaaagagatagaattttattaacatatgtacggaagtatagacacttgattaatatcggatgtataccgactaaaacattaattcatgatggtattgaaggtagttcattcaaagaggctattactagaaaaaaagaagtcgtacaggcattgaataacaagaactatcaaggcttaaattcaaaggacaatatagatgttctaaattataaagctaatttt

SEQ ID NO: 34226 - DNA, 260 bp, Unknown
  Description of Unknown: RightRegion for integrase B8227 sequence
cataagctcttaaagggcataaccgttgaaaagactcacgttacgggtcttattttttaaaagacagctgtaccctctaacgctacatatccaaatggctgtgtatcgttagagggtacgcaacccgtttatgataacacgggaaatgaccgatagcaaggagacaaaaatggacgcattaaataagttagatactttagacaggataatcgtaggtactaaggaaaaaatagaacatataatcagctggtacgcgcggg

SEQ ID NO: 34227 - DNA, 260 bp, Unknown
  Description of Unknown: RightRegion for integrase B8228 sequence
gtcatatcggaaattcgtgttgaccgtgataataacatcacgggaattatttttgggtagtgttgtactaatgcgacactacctgtcggttcgtccgccaggatgatcttcggttctgtgatcagtgctcttgcgattgctgcacgctgtttctgaccgccggacacttcatacggatatttctccagaagcttttcaatggacagtctgcgtgaaagttccatcattttcggtgccatttcactgtaagtctttccgga

SEQ ID NO: 34228 - DNA, 260 bp, Unknown; identical to SEQ ID NO: 34226
  Description of Unknown: RightRegion for integrase B8229 sequence

SEQ ID NO: 34229 - DNA, 260 bp, Unknown
  Description of Unknown: RightRegion for integrase B8230 sequence
gagtatataaatcttaagaacaggcattccattgaaataaaagatatagaattttattaacatatgtacggaagtatagacactcgattaatatttaatgtgcatacttccgtaaaaaataaccaccctcaaaagaatgtggtttagaatatagtatcaatttaaaatcgggaacatagattattataacaaaaaaagagccactcctcatcatagagcacttataaaaataagcaccgtaatgaagaatgactatacag

SEQ ID NO: 34230 - DNA, 94 bp, Unknown
  Description of Unknown: RightRegion for integrase B8231 sequence
gattatgtaaaacttaaaaacaggcattctatcaaaataaacgatatagaattttattaacttatgtacggaagtatagacactcaattaatat

SEQ ID NO: 34231 - DNA, 260 bp, Unknown
  Description of Unknown: RightRegion for integrase B8232 sequence
gtcatatcggaaattcgtgttgaccgtgataataacatcacgggaattatttttgggtagtgttgtactaatgcgacactacctgtgggctcatcagcaagaatcagcttcgggtctgtgatcagagctctggcaaccgctgcacgctgtttctgtccaccggaaacttcataaggatatttatccagaagttctgtgatacacagtgcctgtgcaatcgggcggatcttctgttccatttctcggtaatcttcgccggc

SEQ ID NO: 34232 - DNA, 260 bp, Unknown
  Description of Unknown: RightRegion for integrase B8233 sequence
gaagaaatcctggtggatccagaaaccaggcagataaaagatgtgaaattattgttataaatgcaagggcagtattctatattacaccgtcgagtttgagcccttcgccactgccctggagcaggaaggaaacggctatgtagtcgcatccctcggaaaagattccggctatgtgccctacacggcctacagtgccaagaagagctatatcgaaaagcacccggagatcatccagaaattcacaaacgcgatccagaaag

SEQ ID NO: 34233 - DNA, 260 bp, Unknown
  Description of Unknown: RightRegion for integrase B8234 sequence
gtcatatcagaaattcgtgttgaccgtgataataacatcacgggaattatttttgggtagtgttgtactaatgcaacactacctgtaggttatgtataattagtacaaataacaccactcggcagacctgaatttgtcgggtggtgttttctagctttttttgcttcattcgtaaattaccgcaaatatgcggctatttttaattcatttgtgtgtaaagttcttctattttctcctttagttcctgtatgtcacctctg

SEQ ID NO: 34234 - DNA, 260 bp, Unknown
  Description of Unknown: RightRegion for integrase B8235 sequence
ctgattgatcggattgtcatagatgatgataatgtcaacatcattctccacaagatatagtatgcagatattcaaagtccatgtgcatgggcttcggctgcaacgcggcgggcatcgtgggctgccggatcatcgactcgcccagggaacggctgatcgccatggtcaccaacaactttgtgccctgcaacggccggttccccaccctgatcgccattatctccatgtttttcgtgggcgtggcggggggcgccggaaat

SEQ ID NO: 34235 - DNA, 260 bp, Unknown
  Description of Unknown: RightRegion for integrase B8236 sequence
ataattgacaagataataattgtcaatggagatattgaaatacaattaaagaatttttagcacatactacacgccatgcctacggcagtatgttagtgctaatgccgtatttatcgtacttttacaactaaataaaatttaaatgtcgctttttggtcgttaaactgtcgtttttctgtcgctttaagcggctttttttgtgtgaaaataaaattacgaaaaggagagtgattgaattgtacgatgaagatttaagagag

SEQ ID NO: 34236 - DNA, 84 bp, Unknown
  Description of Unknown: RightRegion for integrase B8237 sequence
ataattgacaagataataattgtcaatggagatattgagatacaattaaagaatttttagcacatactacacgccatgccgatg

SEQ ID NO: 34237 - DNA, 260 bp, Unknown
  Description of Unknown: RightRegion for integrase B8238 sequence
gaagaaatcctggtggatccagaaaccaggcagataaaagatgtgaaattattgttataaatgcaagggcagtattctatattacacggtcgagtttgagccattcgcgaccgccctggagcaggagggaaacggctatgtcgtcgcctccctcggaaaagactccggctacgttccctacaccgcctacagcgcaaaaaagagctatctcgaaaaacatccggagctcatccagaaattcacaaacgcgatccagcgcg

SEQ ID NO: 34238 - DNA, 260 bp, Unknown
  Description of Unknown: RightRegion for integrase B8239 sequence
ataattgacaagataataattgtcaatggagatattgagatacaattaaagaatttttagcacatactacacaccatgccgatggcagtatgttagtgctaataccgtatttatcgtacttttacaactaaataaaatctaactgtcgcttttatgtcgtaaaactgtcgtttttatgtcgtgttcagcggctttttttgtgtgaaaataaaattacaaaaggagagtgattgaattgtatgacgaagatttaagagagc

SEQ ID NO: 34239 - DNA, 109 bp, Unknown
  Description of Unknown: RightRegion for integrase B8240 sequence
ataatcgaaaaaataacacccacagaagatagaaatatctttaatatttttttaaaataatgtatgtacttattaaacccaaccaattgacaaagcacctctataattt

SEQ ID NO: 34240 - DNA, 260 bp, Unknown
  Description of Unknown: RightRegion for integrase B8241 sequence
gaagaaatcctggtggatccagaaaccaggcagataaaagatgtgaaattattgttataaatgcaagggcagtattctatattacaccgtcgagttcgaacccttcgcgacagccctggaacaggaaggaaacggctatgtagtcgcatcccttggaaaagattccggctacgtcccttacacggcctacagtgcaaaaaaaagctatattgaaaagcatccggagatcatccggaaattcacaaacgcgatccagaaag

SEQ ID NO: 34241 - DNA, 260 bp, Unknown
  Description of Unknown: RightRegion for integrase B8242 sequence
ataattgacaagataataattgtcaatggagatattgaaatacaattaaagaatttttagtacatactacacgccatgcctacggcagtatattagtgctaatgccgtatttatcgtacttttacaactaaataaaatctaaatgtcgcttttatgtcgtaaaactgtcgtttttatgtcgtgttcagcggctttttttgtgtgaaaataaaattacaaaaaggagagtgattgaattgtatgacgaagatttaagagag

SEQ ID NO: 34242 - DNA, 136 bp, Unknown
  Description of Unknown: RightRegion for integrase B8243 sequence
gtcatatcagaaattcgtgttgaccgtgataataacatcacgggaattatttttgggtagtgttgtactaatgcgacactacctgtcggctcatctgcaaatataatttccggacgattcaccagtgctcttgcaa

SEQ ID NO: 34243 - DNA, 260 bp, Unknown
  Description of Unknown: RightRegion for integrase B8244 sequence
gtcatatcggaaattcgtgttgaccgtgataataacatcacgggaattatttttgggtagtgttgtactaatgcgacactacctgtaggctgtgttatattagtacaaaagaaatgaccccagcaaggctactgcctgccggggttttcttctcttattatcattcttacagttttattacacttcttacatttctgcactggtcttgttttcgcttctccaaacggtttgcagtaccccgttttgcacaccgggcatat

SEQ ID NO: 34244 - DNA, 260 bp, Unknown
  Description of Unknown: RightRegion for integrase B8245 sequence
ataattgacaagataataattgtcaatggagatattgagatacaattaaagaatttttagcacatactacacgccatgcctatggcagtatgttagtgctaataccgtatttatcgtacttttacaactaaataaaatctaactgtcgcttttatgtcgtaaaactgtcgtttttatgtcgtgttcagcggctttttttgtgtgaaaataaaattacaaaaggagagtgattgaattgtatgacgaagatttaagagagc

SEQ ID NO: 34245 - DNA, 84 bp, Unknown; identical to SEQ ID NO: 34236
  Description of Unknown: RightRegion for integrase B8246 sequence

SEQ ID NO: 34246 - DNA, 260 bp, Unknown
  Description of Unknown: RightRegion for integrase B8247 sequence
gaagaaatcctggtggatccagaaaccaggcagataaaagatgtgaaattattgttataaatgcaagggcagtattctatattacaccgttgaattcgaaccattcgccacagccctggagcaggaaggaaacggctatgtggtcgcgtctctcggaaaagactccggatatgtgccctacaccgcctacagcgctaagaaaagctatatcgaaaagcacccggagatcatccagaaattcacaaacgcgatccagaaag

SEQ ID NO: 34247 - DNA, 260 bp, Unknown
  Description of Unknown: RightRegion for integrase B8248 sequence
gttttaaaagaagtcgtgatcgatcgcgatcttaacattgttagtgtttcgttcgcttagttgtttactaactcactatagcctgtcggttcatcacaaagaagcagttttggattcttgatcaatgcccttgcgattgcacaacgctgctgctgtccacccgataattgtgctggaaatttatcttgatgttctgtcaatccgagcgtgtctaacaattcatccatatctaatggatcttccgttaaaaactgacagat

SEQ ID NO: 34248 - DNA, 130 bp, Unknown
  Description of Unknown: RightRegion for integrase B8249 sequence
gtcatatcggaaattcgtgttgaccgtgataataacatcacgggaattatttttgggtagtgttgtactaatgcgacactacctgtcggctcatctgcaaatataatttccggacgattcaccagtgctc

SEQ ID NO: 34249 - DNA, 260 bp, Unknown
  Description of Unknown: RightRegion for integrase B8250 sequence
attataaacgatattagattagtgaatgattacagattctatataaacttaaaaatataatggagggatcctctatgtctataatcaaagaaaaaatattaaagttttatgctatagatgaactaaaatatttatgcagtaatcatattttcttttatttaactagaaatcatataaaaaatattccaaaactttgtgaatttgctaaatttttagatataaaaactttttatacaacagatgatttcgtaatagattac

SEQ ID NO: 34250 - DNA, 109 bp, Unknown
  Description of Unknown: RightRegion for integrase B8251 sequence
gacttggaacattttacggtgagctttttggatggaacggaaaaagaaatattagtataatgtaaataatatgccacatagcctttgggggttgtgtgacgtttttttg

SEQ ID NO: 34251 - DNA, 260 bp, Unknown
  Description of Unknown: RightRegion for integrase B8252 sequence
gttttaaaagaagtcgtgatcgatcgcgatcttaacattgttagtgtttcgttcgcttagctgtttactaactcgctatagcctgtcggttcgtcgcaaagaagcagctttggattcttgatcaacgcccttgcaattgcacatcgctgctgctgtccaccggataattgtgcaggaaatttatcttgatgttctgttagtccgagcgtatctagcagttcttccatatccaatggatcttccgttaaaaattgacagat

SEQ ID NO: 34252 - DNA, 260 bp, Unknown
  Description of Unknown: RightRegion for integrase B8253 sequence
gaagaaatcctggtggatccagaaaccaggcagataaaagatgtgaaattattattataaatgcaagggcagtattctatattacaccgtcgagttcgaacccttcgccacagccctggagcaggaaggaaacggctatgtagtcgcatccctcggaaaagattccggctatgtgccctacacggcctacagtgccaagaagagctatatcgaaaagcacccggagatcatccagaaattcacaaacgcgatccagaaag

SEQ ID NO: 34253 - DNA, 260 bp, Unknown
  Description of Unknown: RightRegion for integrase B8254 sequence
gaagaaatcctggtggatccagaaaccaggcagataaaagatgtgaaattattgttataaatgcaagggcagtattctatattacaccgtcgagtttgagcccttcgccacagccctggagcaggaaggaaacggctatgtagtcgcgtccctcggaaaagactccggctacgtcccttacacggcctacagtgcaaaaaaaagctatattgaaaagcatccggagatcatccggaaattcacaaatgcgattcagaaag

SEQ ID NO: 34254 - DNA, 260 bp, Unknown
  Description of Unknown: RightRegion for integrase B8255 sequence
gaagaaatcctggtggatccagaaaccaggcagataaaagatgtgaaattattgttataaatgcaagggcagtattctatattacaccgtcgagttcgaacccttcgccactgccctggagcaggaaggaaacggctatgtagtcgcatccctcggaaaagattccggctatgtgccctacacggcctacagtgccaagaagagctatatcgaaaagcacccggagatcatccagaaattcacaaacgcgatccagaaag

SEQ ID NO: 34255 - DNA, 260 bp, Unknown
  Description of Unknown: RightRegion for integrase B8256 sequence
ataattgacaagataataattgtcaatggagatattgagatacaattaaagaatttttagcacatactacacgccatgccgatgataatgggcgagataaagaggtttttgcgggatgatgggatgattaaggtcagcaggacattgcgggaaaatggctggaagataaaaaaagcggcagaaaagataagctatgaaaaaggcagaaatgcaaagataagtgagattgctgctgcaacggagataacggaggaggatat

SEQ ID NO: 34256 - DNA, 260 bp, Unknown
  Description of Unknown: RightRegion for integrase B8257 sequence
gcttcattagtcgagtgtatagaagtttcagaaacaagccataatctcattttcaagtagttgtattatttttggttatcaccactagaccaaaaataatacaaataatatttcttttgactttcatatagtattatgatatattaattataaggttagcaagtagtttgtcatctacttgtttacttcgtttcgttaaaaaggacttctagaggtgggagttctttttttttatgctctaaaatagaaaaacacccgta

SEQ ID NO: 34257 - DNA, 260 bp, Unknown
  Description of Unknown: RightRegion for integrase B8258 sequence
atcattcaggagattcatgtgaacgaagaccatgccataacctccgtcgattttctgtgatgcgtcttgtactaactatactgttccattcggagttagccagttaatacaagacgattttgattatcctacatatgtctttccaccatatcttgcagcaatccagcctgatggaatctgcatccagatatcattgctgatcatcttacattccaagcaaaactctccatgtgttctgtccaacaatgccgtctggtgta

SEQ ID NO: 34258 - DNA, 260 bp, Unknown
  Description of Unknown: RightRegion for integrase B8259 sequence
ataattgacaagataataattgtcaatggagatattgagatacaattaaagaatttttagcacatactacacgccatgccgatggcagtatgttagtgctaataccgtatttatcgtacttttacaactaaataaaatctaactgtcgcttttatgtcgtaaaactgtcgtttttatgtcgtgttcagcggctttttttgtgtgaaaataaaattacaaaaggagagtgattgaattgtatgacgaagatttaagagagc

SEQ ID NO: 34259 - DNA, 260 bp, Unknown
  Description of Unknown: RightRegion for integrase B8260 sequence
gtattgagagaaataagagtagataatgaccggaatatcacgggcatttcatttttttgatctttgttgtactaactttgcattgcccgtgggttgtgtatagttagtacaatatttgaaaaagccctaaaatccaacgtttttaggggtttaatttaatgctgatctatacattttgacgtgcttctctgactaaatttcgattaaattcaatctttacgcctttatttccggaggttaaaacacaagccggtgttcca

SEQ ID NO: 34260 - DNA, 260 bp, Unknown
  Description of Unknown: RightRegion for integrase B8261 sequence
gttttaaaagaagtcgtgatcgatcgcgatcttaatattgttagcgtttcgttcgcttagctgtttactaactcactatatcctgtcggttatagtgtgttagtaaacaaaaatatttttgataaaaccagggcggtatttgtgactgctgccctggttttatttcttgtttaataaaaataattaattaaatatgtcttccctttatactcaaccactccccaatttgtaattggttcgtttgtttctaacatcttttt

SEQ ID NO: 34261 - DNA, 260 bp, Unknown
  Description of Unknown: RightRegion for integrase B8262 sequence
gtcattaaagaaataaggattgacaatgaccagaatatcacgggtgttgtttttgggtagtgttgtactaattgaacactacccgtcggctcatctgcaagtattatctgcggctgtgtaattaatgctcttgccaccgctgccctttgcttttgtccgcctgatacctcataaggatatttatccagaagctgtgttataccaagctttgctgcaagcggctttaagcgttcttccatctcattatatttctttccggc

SEQ ID NO: 34262 - DNA, 260 bp, Unknown
  Description of Unknown: RightRegion for integrase B8263 sequence
aaaattattgataaaatatatattgaaaatggaaaaattaaagagattactttttcgtaatctctttaatgtataatcccttgtatttctaatatttctttgtttggtaattagtcgttcgtttcaactggtgcctcaactgggcaaactcctgcacaagtaccacaagatatacatgctgatgcatctataacaaatttatcttcaccttgtgaaatacatcctaccggacattctgcagcacaagctccacaagatat

SEQ ID NO: 34263 - DNA, 260 bp, Unknown
  Description of Unknown: RightRegion for integrase B8264 sequence
gtcattaaagaaataaggattgacaatgaccagaatatcacgggtgttgtttttgggtagtgttgtactaattgaacactacctgtaggctcgtcgcagagcagtatatccggatttttcacgattgcacgaccgattgacacacgctgctgctgtccgccggatagctgatttggaagcttatagcggtgctcgtaaagccccagcgtgtgaagcagctcatcgatatccagcgcattgtctgacaggtatgcgcccac

SEQ ID NO: 34264 - DNA, 260 bp, Unknown
  Description of Unknown: RightRegion for integrase B8265 sequence
gtcattaaagaaataagaattgacaatgaccagaatatcacgggtgttgtttttgggtagtgttgtactaattgaacactacccgtaggttcatcagcaagaatcagctttggattagtgataatcgctctagcacttgcaactctctgcttctgtccacctgacatctgatacggatatttatttaacacttcataaattccaagttcatttgcaacttttttcacacgtctgtcaatttcaccggcttttatattctg

SEQ ID NO: 34265 - DNA, 138 bp, Unknown
  Description of Unknown: RightRegion for integrase B8266 sequence
gtcattaaagaaataaggattgacaatgaccagaatatcacgggtgttgtttttgggtagtgttgtactaattgaacactacccgttggctcatcagccaaaattaattcgggatttgttattatcgcacgtgccact

SEQ ID NO: 34266 - DNA, 83 bp, Unknown
  Description of Unknown: RightRegion for integrase B8267 sequence
gtcattaaagaaataaggattgacaatgaccagaatatcacgggtgttgtttttgggtagtgttgtactaattgaacactacc

SEQ ID NO: 34267 - DNA, 85 bp, Unknown
  Description of Unknown: RightRegion for integrase B8268 sequence
gtcattaaggaaataaagattgataatgaccagaatatcacgggtgttgtttttgggtagtgttgtactaattgaacactacccg

SEQ ID NO: 34268 - DNA, 260 bp, Unknown
  Description of Unknown: RightRegion for integrase B8269 sequence
gtcattaaagaaataaggattgacaatgaccagaatatcacgggtgttgtttttgggtagtgttgtactaattgaacactacccgtcgggtatatacatcaaagatatcctcgataatcaaaccgttcttggcgtgtttggtcgtattcttggtaattccgagattcttcaacgtctggatatcacggctgacgtctgcattcgtttttgctatctcgtttttatcgaccacgatcggaaaataattctgggcattaaac

SEQ ID NO: 34269 - DNA, 260 bp, Unknown
  Description of Unknown: RightRegion for integrase B8270 sequence
gtcattaaagaaataagaattgacaatgaccagaatatcacgggtgttgtttttgggtagtgttgtactaattgaacactacccgttggctcatcagccaaaattaattcgggatttgttattatcgcacgtgccactgctgccctttgcttctgtcctcctgacacctcgtatggatatttattaagcagcttttcaattccaagcagtgaagctataggtgcaagccttttttccatatccctatagtccacacctga

SEQ ID NO: 34270 - DNA, 260 bp, Unknown
  Description of Unknown: RightRegion for integrase B8271 sequence
gtcattaaagaaataaggattgacaatgaccagaatatcacgggtgttgtttttgggtagtgttgtactaattgaacactacccgtcggttcatcagcaaatattatctgcggattagttataagtgcccttgctactgctgctctttgcttctgtccaccagatacctcatatggatatttatccagaagctgttctataccaagtcttttagaaagcggctttaccctttcttccatctcgttatattttttccctga

SEQ ID NO: 34271 - DNA, 260 bp, Unknown
  Description of Unknown: RightRegion for integrase B8272 sequence
tcctgcatcagggaaatccgggtggatcacgataaaaacattgatattgtatttttataacctgaaatcgtatacagttttttacatataaccattcgggttattgctctgccatctccaggaatcctcgcacatttcacggatgccgttctctgcagtccagccaagctctctggctgccttggaagcatcgcagtagcaggttgcaatatcaccggcacgacgtggtttgatcacatatggaatcttcacgcctgttg

SEQ ID NO: 34272 - DNA, 260 bp, Unknown
  Description of Unknown: RightRegion for integrase B8273 sequence
gtcattaaagaaataaggattgacaatgaccagaatatcacgggtgttgtttttgggtagtgttgtactaattgaacactacccgtcggttcatcggcaaggatcatttggggatgtaagatcagagcccttgctgccgcaacacgctgacgttgaccgccggacatcttggacggaaacttatccagaacatcagaaatttccagatagtcagccaactgcttcagccgctggctgctttctgtttcggctaccccatg

SEQ ID NO: 34273 - DNA, 135 bp, Unknown
  Description of Unknown: RightRegion for integrase B8274 sequence
gtcattaaagaaataaggattgacaatgaccagaatatcacgggtgttgtttttgggtagtgttgtactaattgaacactacccgtcggttcatcagctaaaatcagtttcggttcattgattaaggctctagca

SEQ ID NO: 34274 - DNA, 186 bp, Unknown
  Description of Unknown: RightRegion for integrase B8275 sequence
gtcattaaagaaataagaattgacaatgaccagaatatcacgggtgttgtttttgggtagtgttgtactaatttaacactacccgtcggttcatcagctaaaatcagtttcggttcattgattaaggctctagcacaagcacaacgctgtttttgtccgccagaaacttcataaggaaatttcgat

SEQ ID NO: 34275 - DNA, 260 bp, Unknown
  Description of Unknown: RightRegion for integrase B8276 sequence
gtcattaaagaaataagaattgacaatgaccagaatatcacgggtgttgtttttgggtagtgttgtactaatgctacactacccgtcggctcatccgcgagcactatagatggtctcgtaatcagggctcttcctatagatgtgcgctgctgctgtccacctgagagctcatttggcagatgagtacgtctctctgtaagtccaaggcgcaaaagcatgtcatccatctgtgctttttccacctttcttccatcaagctc

SEQ ID NO: 34276 - DNA, 260 bp, Unknown
  Description of Unknown: RightRegion for integrase B8277 sequence
gtcattaaagaaataagaattgacaatgaccagaatatcacgggtgttgtttttgggtagtgttgtactaattgaacactacctgtcggctcatcggcaagcaccagacttggacttgttataattgcccttgcagaagcaactctctgtttctgtccacctgacatctggtaaggatatttatttaatatctctgttatatcaagctgttctgctacattttttactgccctgtcaattacatcagcagaatcatttct

SEQ ID NO: 34277 - DNA, 109 bp, Unknown
  Description of Unknown: RightRegion for integrase B8278 sequence
gtcattaaagaaataaggattgacaatgaccagaatatcacgggtgttgtttttgtgtagtgttgtactaattgaacactacccgtaggctcatcagctagtattattg

SEQ ID NO: 34278 - DNA, 135 bp, Unknown
  Description of Unknown: RightRegion for integrase B8279 sequence
gtcattaaagaaataaggattgacaatgaccagaatatcacgggtgttgtttttgggtagtgttgtactaattgaacactacccgtcggttcatcggcaaggatcatttggggatgtaagatcagagcccttgct

SEQ ID NO: 34279 - DNA, 260 bp, Unknown
  Description of Unknown: RightRegion for integrase B8280 sequence
gtcattaaagaaataagaattgacaatgaccagaatatcacgggtgttgtttttgggtagtgttgtactaattgaacactacccgtgggctgtgttaagttagtacaaaataaagacccccagcaaggctgctgcctgccggggtcttattttacagtccatttcctttgaacattgcccacccaccttttgaaaacgggttgtttttatcttttggaaagtcctttagatattgcttgaataaacttgctcttatatgt

SEQ ID NO: 34280 - DNA, 151 bp, Unknown
  Description of Unknown: RightRegion for integrase B8281 sequence
gtcattaaagaaataggaattgacaatgaccagaatatcacgggtgttgtttttgggtagtgttgtactaattgaacactacccgttggctcatcagccaaaattaattcgggatttgttattatcgcacgtgccactgctgccctttgct

SEQ ID NO: 34281 - DNA, 260 bp, Unknown
  Description of Unknown: RightRegion for integrase B8282 sequence
gtcattaaagaaataagaattgacaatgaccagaatatcacgggtgttgtttttgggtagtgttgtactaattgaacactacccgtaggctcgtcgcagagcagtatatccggatttttcacgattgcacgccctattgacacacgctgctgctgtccaccagatagctgatttggaagcttatagcggtgctcgtaaagccccagcgtgtgaagcagctcatcgatatcaagtgcgttgtcagacagataagctcccac

SEQ ID NO: 34282 - DNA, 260 bp, Unknown
  Description of Unknown: RightRegion for integrase B8283 sequence
accttaaaagagatccgggtgaataatgccaatgaaattacaggcatctcatttttttaatctgtgttgtactaatcatacataacctgttggctcgtctgcaaggatcaaagccggacgggtaatcagcgcgcgtccaatggccactctctgctgctggccgccggaaagctggcttggcaggtaattccggcgatcttttaaattcagtacagtcagaagctcttccagatattttctgtccggcttctgataatcca

SEQ ID NO: 34283 - DNA, 138 bp, Unknown
  Description of Unknown: RightRegion for integrase B8284 sequence
gtcattaaagaaataagaattgataatgaccagaatatcacgggtgttgtttttgggtagtgttgtactaattgaacactacccgttggctcatcagccaaaattaattcaggatttgttattatcgcacgtgccact

SEQ ID NO: 34284 - DNA, 260 bp, Unknown
  Description of Unknown: RightRegion for integrase B8285 sequence
gtcattaaagaaataagaattgacaatgaccagaatatcacgggtgttgtttttgggtagtgttgtactaattgaacactacccgttggctcatcagccaaaattaattcaggatttgttattatcgcacgtgccactgctgccctttgcttctgtcctcctgacacctcgtatggatatttattaagcagcttttcaattccaagcagcgaagctataggtgcaagccttttttccatatccctatagtccacacctga

SEQ ID NO: 34285 - DNA, 260 bp, Unknown
  Description of Unknown: RightRegion for integrase B8286 sequence
gtcattaaagaaataaggattgacaatgaccagaatatcacgggtgttgtttttgggtagtgttgtactaattgaacactacccgttggcccatctgccaaaattaattcgggatttgttattatcgcacgtgccactgctgccctttgcttctgtcctcctgacacctcatatggatatttattaagcagcttttcaattccaagcagcgaagctataggtgcaagccttttttccatatccctatagtccacacctga

SEQ ID NO: 34286 - DNA, 260 bp, Unknown
  Description of Unknown: RightRegion for integrase B8287 sequence
gtcattaaagaaataaggattgacaatgaccagaatatcacgggtgttgtttttgggtagtgttgtactaattgaacactacccgtcggttcatcagcaaggataatcgcaggcttcgtaattaaagctcgtgcaatcgctacacgttgctgttgaccgcctgaaagattgttcggcatattttccagtttatcttctaaagccaacatatacacaacttcgtccataaatttctggtctactgtatcgccatccagttc

SEQ ID NO: 34287 - DNA, 167 bp, Unknown
  Description of Unknown: RightRegion for integrase B8288 sequence
accttaaaagagatccgggtgaataatgccaatgaaattacaggcatctcatttttttaatctgcgttgtactaatcatacataacctgtcggctcatccgcaaggataatagcaggctttgtcgcaagggcacgggcaatcgcaaccctctgctgttgaccacctg

SEQ ID NO: 34288 - DNA, 260 bp, Unknown
  Description of Unknown: RightRegion for integrase B8289 sequence
accttaaaagagatccgtgttaataatgccaatgaaatcacaggcatctcatttttttaatctgtgttgtactaatcatacataacctgtaggctcgtctgccagaacgatctttggcttggaagccagagcccttgcaatagccactctctgctgctggccgccggaaagctgattgggacggttcctggatttttccgtcagtcctaaaaggctcaatatttttccgataaactcatcatcaggtttatttccgtcca

SEQ ID NO: 34289 - DNA, 139 bp, Unknown
  Description of Unknown: RightRegion for integrase B8290 sequence
gtcattaaagaaataagaattgacaatgaccagaatatcacgggtgttgtttttgggtagtgttgtactaacttaacactacccgtcggctcatcagccaatatgatagaaggttttgctgccagcgctctggctatcg

SEQ ID NO: 34290 - DNA, 138 bp, Unknown
  Description of Unknown: RightRegion for integrase B8291 sequence
gtcattaaagaaataagaattgacaatgaccagaatatcacgggtgttgtttttgggtagtgttgtactaattgaacactacctgtcggttcatcggcaaggatcatttggggatgtaagatcagagcccttgctgcc

SEQ ID NO: 34291 - DNA, 260 bp, Unknown
  Description of Unknown: RightRegion for integrase B8292 sequence
gtcattaaagaaataaggattgacaatgaccagaatatcacgggtgttgtttttgggtagtgttgtactaattgaacactacccgtaggctcatcacataaaatggcttccggagatactgcaagcgcccttgcgattgcaactctttgttgttcaccgccggacaaattgattgggtaatcattttccttgctttctaagccgacactttttagcaagcctgtaattatctcgtgacgctgtttggcggtaaacgactt

SEQ ID NO: 34292 - DNA, 260 bp, Unknown
  Description of Unknown: RightRegion for integrase B8293 sequence
gtcattaaagaaataaggattgacaatgaccagaatatcacgggtgttgtttttgggtagtgttgtactaattgaacactacccgtcggttcatcggcaagtatgatatctgcattagtaaccaatgctcttgctatcgcaactctctgctgctgtccgcctgacatctttcccggaagcttgtttctttccgataatattccaagatgttccatctgttttaatataattctctttctttccttgcgcttaacattggc

SEQ ID NO: 34293 - DNA, 139 bp, Unknown
  Description of Unknown: RightRegion for integrase B8294 sequence
gtcattaaagaaataaggattgacaatgaccagaatatcacgggtgttgtttttgggtagtgttgtactaattgaacactacccgtcggctcatctgcaaatataatttccggacgattcaccagtgctcttgcaattg

SEQ ID NO: 34294 - DNA, 134 bp, Unknown
  Description of Unknown: RightRegion for integrase B8295 sequence
gtcattaaagaaataagaattgacaatgaccagaatatcacgggtgttgtttttgggtagtgttgtactaattgaacactacccgtgggctgtgttaagttagtacaaaataaagaaccccagtaaggttgttg

SEQ ID NO: 34295 - DNA, 260 bp, Unknown
  Description of Unknown: RightRegion for integrase B8296 sequence
gtcattaaagaaataaggattgacaatgaccagaatatcacgggtgttgtttttgggtagtgttgtactaattgaacactacccgtcggttcatcggccaaaatcagacggctgttattaaccagagctcttgcacatgcacatctttgctgctgtccaccggaaacctgatgcggatacttatctgctatttcttttatattgagaatttccataatcttttccgtctttttcatcacatctgttccctgatttttggt

SEQ ID NO: 34296 - DNA, 260 bp, Unknown
  Description of Unknown: RightRegion for integrase B8297 sequence
gtcattaaagaaataaggattgacaatgaccagaatatcacgggtgttgtttttgggtagtgttgtactaattgaacactacccgtgggctcatccgccaggatcagggacgggtcccctgcgagagcccgcgcgatggagactcgctgctgctggccgccggaaagctggttcggaagattcttccatttttcgtcgagaccgaccttttttaaggaattcatggcccgctcccgccgttctttcttgtcgtaaccggc

SEQ ID NO: 34297 - DNA, 260 bp, Unknown
  Description of Unknown: RightRegion for integrase B8298 sequence
gtcattaaagaaataagaattgacaatgaccagaatatcacgggtgttgtttttgggtagtgttgtactaattgaacactacctgtgggctgtgttaagttagtacaaaataaagaaccccagcaaggctgctgcctgctggggtcttcttctcttaaaactcttcttcgtagccagttgttttttgcactgttctcatataatctgccagcgtgtattccccgctgctgataaaatacctgttcgccccgtacccttgt

SEQ ID NO: 34298 - DNA, 260 bp, Unknown
  Description of Unknown: RightRegion for integrase B8299 sequence
gtcattaaagaaataaggattgacaatgaccagaatatcacgggtgttgttttttggtagtgttgtactaattgaacactacccgtaggctcgtcgcagagcagtatatccggatttttcacgattgcacgccctattgacacacgctgctgctgtccgccggatagctgatttggaagcttatagcggtgctcgtaaagccccagcgtgtgaagcagctcatcgatatccagtgcgttgtcagacagataagcgcccac

SEQ ID NO: 34299 - DNA, 260 bp, Unknown
  Description of Unknown: RightRegion for integrase B8300 sequence
gtcattaaagaaataaggattgacaatgaccagaatatcacgggtgttgtttttgggtagtgttgtactaattgaacactacccgtaggctcatccgcaagcagaagctttggatgattgaccatagctctcgctatcgccactctctgcttctgtcctcctgaaagctgtgttggcctgaaatcagccctgtctgaaagccctacacgctctaatgcctccatgcccatctgccttctgtcctttttgctcacaccggc

SEQ ID NO: 34300 - DNA, 260 bp, Unknown
  Description of Unknown: RightRegion for integrase B8301 sequence
gtcattaaagaaataaggattgacaatgaccagaatatcacgggtgttgtttttgggtagtgttgtactaattgaacactacccgtcggttcatcggctaagatcagctgcggctgtgtaatcagcgctcttgcgactgcggcacgctgtttttgtccgccggatacttcatacggatacttttccagcaaatgcgtgatttcaagcttctttgcaatcggttctaatttctgcatcatttgcgggtactgttctcctga

SEQ ID NO: 34301 - DNA, 260 bp, Unknown; identical to SEQ ID NO: 34291
  Description of Unknown: RightRegion for integrase B8302 sequence

SEQ ID NO: 34302 - DNA, 260 bp, Unknown
  Description of Unknown: RightRegion for integrase B8303 sequence
gtcattaaagaaataaggattgacaatgaccagaatatcacgggtgttgtttttgggtagtgttgtactaattgaacactacccgtaggctcatcgcataacagaaggctcggattcttgatcaaggctctggcgatggcacagcgttgctgttgtccgccggaaagttgtgccgggaacttgttctgatgttccgtcagtcccagtacctgcagcagttcctccatattcaaaggattcttcgtcagatactggcagac

SEQ ID NO: 34303 - DNA, 260 bp, Unknown
  Description of Unknown: RightRegion for integrase B8304 sequence
gtcattaaagaaataagaattgacaatgaccagaatatcacgggtgttgtttttgggtagtgttgtactaattgaacactacccgtgggctcgtcagccaggatcagcgacggatttcccgccagggccctggcaatggagaccctctgctgctggccgcctgaaagctgctttggaaaattcctccacttttctttcagtcctacccgttccagggattccatggcccgttccctccggtcccagggatccatgcccgc

SEQ ID NO: 34304 - DNA, 260 bp, Unknown
  Description of Unknown: RightRegion for integrase B8305 sequence
gtcattaaagaaataagaattgacaatgaccagaatatcacgggtgttgtttttgggtagtgttgtactaattgaacactacccgtaggctcatcagctagtattattggagcatctgataccaatgctctggcaatagctactctttgctgctgtccaccagataatttcataacatttctttttatttgttttttatctaagcccagttcaaacaagataccttcatctgctgatttattcaccaatctaatattttc

SEQ ID NO: 34305 - DNA, 260 bp, Unknown
  Description of Unknown: RightRegion for integrase B8306 sequence
gtcattaaagaaataagaattgacaatgaccagaatatcacgggtgttgtttttgggtagtgttgtactaattgaacactacccgtaggctcatcagccagtattattggagcatctgataccaatgctctggcaatagctactctttgctgctgtccaccagataatttcataacatttctttttatttgttttttatctaagcctaattcaaacaagatactttcatctgctgatttattcactaatctaatattttc

SEQ ID NO: 34306 - DNA, 260 bp, Unknown
  Description of Unknown: RightRegion for integrase B8307 sequence
gtcattaaagaaataaggattgacaatgaccagaatatcacgggtgttgttttttggtagtgttgtactaattgaacactacccgtcggctcatctgcaaatataatttccggacgattcaccagtgctcttgcaattgctactctctgctgctgtcctccggataactgatttggcagattataaatccggttttcaatccccagagttgcaataatatcatttacatacgcttcatccacttttcttccatccagccc

SEQ ID NO: 34307 - DNA, 86 bp, Unknown
  Description of Unknown: RightRegion for integrase B8308 sequence
gtcattaaagaaataagaattgacaatgaccagaatatcacgggtgttgtttttgggtagtgttgtactaattgaacactacccgt

SEQ ID NO: 34308 - DNA, 260 bp, Unknown
  Description of Unknown: RightRegion for integrase B8309 sequence
accttaaaagagatccgtgtaaataatgccaatgaaatcacaggcatctcatttttttaatctgtgttgtactaatcatacataacctgtaggttatatacaattagtacaacgtattttttttacaatcggcttgacatttatgtaatatggccatatagtaatcttgtcgagtacagtggatgctctgtatctcggttccacccgcaatcccggtggacacggattgaaattataacatcttagctaaaagcgagagc

SEQ ID NO: 34309 - DNA, 260 bp, Unknown
  Description of Unknown: RightRegion for integrase B8310 sequence
gtcattaaagaaataaggattgacaatgaccagaatatcacgggtgttgtttttgggtagtgttgtactaattgaacactacccgtgggctgtgttaagttagtacaaaataaagaaccccagcaaggctgctgcctgccggggtcttattttacagtccatttcctttgaacattgcccacccaccttttgaaaacgggttgtttttatcttttggaaagtcctttagatattgcttgaataaacttgctcttatatgt

SEQ ID NO: 34310 - DNA, 260 bp, Unknown
  Description of Unknown: RightRegion for integrase B8311 sequence
gtcattaaagaaataaggattgacaatgaccagaatatcacgggtgttgtttttgggtagtgttgtactaattgaacactacccgtgggcagtgttaagttagtacaaatataaaaaggctacacactgactgtgtacccctctgcaacgaaccccagcaagcctgctgcctgccggggttttgttattctcccatattgtctggcacgtcttcttccgtgaccgttctttctcttgcaatcagcttcaacggcaaaaac

SEQ ID NO: 34311 - DNA, 260 bp, Unknown
  Description of Unknown: RightRegion for integrase B8312 sequence
accttaaaagagatccgggtaaataatgccaatgaaattacaggcatctcatttttttaatctgtgttgtactaatcgtacataacctgtaggctcatcggcaagaataaaagccggatcattaataagagctcttccaaccgataccctctgctgctgaccgccggaaagctgtcccggaaggtgctttctcctgttggataatcctgtcatttccacaattcgctccagcttccctgcatccggctttctctggtcca

SEQ ID NO: 34312 - DNA, 260 bp, Unknown
  Description of Unknown: RightRegion for integrase B8313 sequence
atcatcaaagaaatatacattgataaagaaaagcgcattaccaaggttatatttttatagaattttatctgtatattttagtattgtcctgatggggagaccggagctgcgatgcgttatctctcccaacgatttgccatgccttaccgtcctgttatgggtatcctcacagatataggtacagaagcatcaaaatatgaatttgtagatttggtatagacgaaaaaagaaatactggcatatcccatctgctctatagt

SEQ ID NO: 34313 - DNA, 260 bp, Unknown
  Description of Unknown: RightRegion for integrase B8314 sequence
gtcattaaagaaataaggattgacaatgaccagaatatcacgggtgttgtttttgggtagtgttgtactaattgaacactacccgtcggctcatcagcgaatataactgaaggatgggtaattaatgcccttgcaattgcgactctctgctgctcaccacctgacatctgtgcagggaatttatccttacaataatctatgccaagtgattccattaattcagtaacttcctcctcatcatcttcctcactgtcaagaat

SEQ ID NO: 34314 - DNA, 260 bp, Unknown
  Description of Unknown: RightRegion for integrase B8315 sequence
gtcattaaagaaataaggattgacaatgaccagaatatcacgggtgttgtttttgggtagtgttgtactaattgaacactacccgtcggttcatcggctaagatcagctgcggctgtgtaatcagcgctcttgcgactgccgcacgctgtttttgcccgccggatacttcatacggatacttttccagcaaatgcgtgatttcaagcttctttgcaatcggttctaatttctgcatcatttgcgggtactgttctcctga

SEQ ID NO: 34315 - DNA, 128 bp, Unknown
  Description of Unknown: RightRegion for integrase B8316 sequence
gtcattaaagaaataagaattgacaatgaccagaatatcacgggtgttgtttttgggtagtgttgtactaattgaacactacccgtcggctcatcagccaaaataatatctggattagaaatcaaact

SEQ ID NO: 34316 - DNA, 260 bp, Unknown
  Description of Unknown: RightRegion for integrase B8317 sequence
gtcattaaagaaataagaattgacaatgaccagaatatcacgggtgttgtttttgggtagtgttgtactaattgaacactacccgtcggttcatctgcaagcaggatatccggatcattcactaatgcccgggcaatcgcaacacgctgcatctgtcccccggacatctgacttggtcgcttgtgaagctgcgcacctagtccaaccttttcaagcgcttctgtcgcacgcttccttctctcggacttgccaatccccga

SEQ ID NO: 34317 - DNA, 186 bp, Unknown
  Description of Unknown: RightRegion for integrase B8318 sequence
gtcattaaagaaataaggattgacaatgaccagaatatcacgggtgttgtttttgggtagtgttgtactaattgaacactacccgtaggctcatcagctagtattattggagcatctgataccaatgctctagcaatagctactctttgctgctgtccaccagataatttcataacatttcttttt

SEQ ID NO: 34318 - DNA, 260 bp, Unknown
  Description of Unknown: RightRegion for integrase B8319 sequence
gtcattaaagaaataaggattgacaatgaccagaatatcacgggtgttgtttttgggtagtgttgtactaattgaacactacccgtaggctcgtcgcagagcagtatatccggatttttcacgattgcacgccctattgacacacgctgctgctgtccgccggatagctgatttggaagcttatagcggtgctcgtaaagccccagcgtgtgaagcagctcatcgatatccagtgcgttgtcagacagataagcgcccac

SEQ ID NO: 34319 - DNA, 260 bp, Unknown
  Description of Unknown: RightRegion for integrase B8320 sequence
gtcattaaagaaattagaattgataatgaccagaatatcacgggtgttgtttttgggtagtgttgtactaatgtgacactacccgtcggctcatccgcaaatataatttccggacgattcaccagtgctcttgcaatcgctactctctgctgctgtcctccggataactgatttggcagattataaatcctcttttcaattcccagagtttcaatgatatcatttacatacgcttcatccacttttcttccatccagccc

SEQ ID NO: 34320 - DNA, 260 bp, Unknown
  Description of Unknown: RightRegion for integrase B8321 sequence
gtcattaaagaaataaggattgacaatgaccagaatatcacgggtgttgtttttgggtagtgttgtactaattgaacactacccgtaggctcgtcagcaagcaggatatcaggattatttacaagtgctcttgcaatagcaaccctctgcatctgtccacctgacatctgattaggcttcttgtgaatctgctctccaagtccaactttctcaagtgcctctatcgctcttttctttctctctgccttagatacacctga

SEQ ID NO: 34321 - DNA, 260 bp, Unknown
  Description of Unknown: RightRegion for integrase B8322 sequence
gtcattaaagaaataaggattgacaatgaccagaatatcacgggtgttgtttttgggtagtgttgtactaatttaacactacccgtaggctcatctgccagtaccagctccggcttgattatcaaggctcttgctaccgccgcacgctgtttctgtccgccggatacttcataaggatatttttccagaatatcaagaattccaagctgcgccgcaatcggtgttatgcgccgctccatctctttataatccacaccgga

SEQ ID NO: 34322 - DNA, 260 bp, Unknown
  Description of Unknown: RightRegion for integrase B8323 sequence
gtcattaaagaaataaggattgacaatgaccagaatatcacgggtgttgtttttgggtagtgttgtactaattgaacactacccgtcggctcatcagccaaaataatatctggattagaaatcaaactacgggctgcggctacacgctgcttttgaccgccggacatttgcgccggaaactttgaaagaacatcagtaattccaagaaatccggctatatcatttaggtgcttttcggctatggaactatctatattgtg

SEQ ID NO: 34323 - DNA, 260 bp, Unknown
  Description of Unknown: RightRegion for integrase B8324 sequence
gtcattaaagaaataaggattgacaatgaccagaatatcacgggtgttgtttttgggtagtgttgtactaattgaacactacccgtcgggtatgtagagttaagggaaattacgtatttctcgtctgcgctgtcaattctgctatcgcagatatatacgtaatagtctttacctaccgcaaaagcgctgcctgcgtccagattagcagccgtaagaatggtgtttgctgtcttgaaaattccagcaccacccacggcaat

SEQ ID NO: 34324 - DNA, 260 bp, Unknown
  Description of Unknown: RightRegion for integrase B8325 sequence
gtcattaaagaaataaagattgacaatgaccagaatatcacgggtgttgtttttgggtagtgttgtactaacttaacactacccgttggctcatctgccaaaataatatcggggtcggaaatcaaactgcgggcggcagcgacgcgctgtttttgaccacctgacatctgcgccggaaatttggagagcacatccgtgattccaaaaagtcctgcaatgtcattcaacttcttctccgcagcagatatatctacattatg

SEQ ID NO: 34325 - DNA, 260 bp, Unknown
  Description of Unknown: RightRegion for integrase B8326 sequence
gtcattaaagaaataaggattgacaatgaccagaatatcacgggtgttgtttttgggtagtgttgtactaattgaacactacccgtgggttcatccgctaagagaatagccggcttataagataatgcccgggcaattgctgttctctgctgctgaccgccggataacgtacccggcagtgcatcccgcttatcttctattttcagttgccttaacaattcttctatatatgccttgtccacataacctccatccagctc

SEQ ID NO: 34326 - DNA, 85 bp, Unknown
  Description of Unknown: RightRegion for integrase B8327 sequence
gtcattaaagaaataatgattgacaatgaccagaatatcacgggtgttgtttttgggtagtgttgtactaattgaacactacccg

SEQ ID NO: 34327 - DNA, 260 bp, Unknown
  Description of Unknown: RightRegion for integrase B8328 sequence
gtcattaaagaaataaggattgacaatgaccagaatatcacgggtgttgtttttgggtagtgttgtactaattgaacactacccgtgggctcatccgcaagcagtatgtccggcttatttgccagtgccaccgctatcgctgcgcgctgctgctctcctcccgatagctgagccggaagcttatccttatgctcctgtaatcccactgcatttaacagtttaagggcatagcttttattatcatccttgcgtttttttat

SEQ ID NO: 34328 - DNA, 139 bp, Unknown
  Description of Unknown: RightRegion for integrase B8329 sequence
gtcattaaagaaataaaaattgacaatgaccagaatatcacgggtgttgtttttgggtagtgttgtactaattgaacactacccgttggctcatctgccaataagagtttcggattgttgataattgctcttgcacagg

SEQ ID NO: 34329 - DNA, 260 bp, Unknown
  Description of Unknown: RightRegion for integrase B8330 sequence
tcaattatagataaaatctatgtagaagataatcaaattaaaaagattacatttctgtaatctttttttattaattgtccatattttccggagcatctgttggacatactccttggcatgttccacattctatacatatttctgggtctattatgtatttatcgtccccttctgaaatacaacttactggacatgctgctgcacatgctccacattttatacatctatctgttattttataagccactttttttcacctc

SEQ ID NO: 34330 - DNA, 139 bp, Unknown
  Description of Unknown: RightRegion for integrase B8331 sequence
gtcattaaagaaataaggattgacaatgaccagaatatcacgggtgttgtttttgggtagtgttgtactaacttaacactacccgtcggctcatctgcaaatataatttccggacgattcaccagtgctcttgcaattg

SEQ ID NO: 34331 - DNA, 109 bp, Unknown
  Description of Unknown: RightRegion for integrase B8332 sequence
aggattattgataaaatttatattgagaacggcgaaattaaagaggttacttttttgtaacctcttttgatgtataatctcttgcatttctagtattttatcgttccaa

SEQ ID NO: 34332 - DNA, 260 bp, Unknown
  Description of Unknown: RightRegion for integrase B8333 sequence
gtcattaaagaaataaggattgacaatgaccagaatatcacgggtgttgtttttgggtagtgttgtactaattgaacactacccgtgggctgtgttaagttagtacaaaatagaaaaccccagcaaggctgctgcctgccggggttttattttacagtccatttccattgaacattgcccacccgccttttgaaaacgggttgtttttatctttcggaaagtcctttagatattgcttgaataaacttgctcttatatgt

SEQ ID NO: 34333 - DNA, 260 bp, Unknown
  Description of Unknown: RightRegion for integrase B8334 sequence
gtcattaaagaaataagaattgacaatgaccagaatatcacgggtgttgtttttgggtagtgttgtactaattgaacactacccgtaggctcatcagccagtattattggagcatctgataccaatgctctggcaatagctactctttgctgctgtccaccagataatttcataacatttctttttatttgttttttatctaagcctagttcaaacaagatactttcatctgctgatttattcactaatctaatattttc

SEQ ID NO: 34334 - DNA, 260 bp, Unknown
  Description of Unknown: RightRegion for integrase B8335 sequence
gtcattaaagaaataagaattgacaatgaccagaatatcacgggtgttgtttttgggtagtgttgtactaattgaacactacccgtcggctcgtcaccgagaagaatctttggattctttgcaagtgcccgcgcaattgagacacgctgctgttctccgcctgacatctgggctggaaatttatttctgcactcactaagtcccaccagcttcaaaagctcatccgcatcccttgcacccttcacaatacttttaaccag

SEQ ID NO: 34335 - DNA, 260 bp, Unknown
  Description of Unknown: RightRegion for integrase B8336 sequence
gtcattaaagaaataaggattgacaatgaccagaatatcacgggtgttgtttttgggtagtgttgtactaattgaacactacccgtcggctcatcgcagagaagcaaatccggtcttttgacaaccgcccttgcaacagaaatacgctgctgttccccaccggaaagctgagacggaaagtgacctgcccgctcctccagaccgaccatggcgagcgcctcatccgccttcatcgcacttttcacaagtgacgccgccag

SEQ ID NO: 34336 - DNA, 160 bp, Unknown
  Description of Unknown: RightRegion for integrase B8337 sequence
gtcattaaagaaataaggattgacaatgaccagaatatcacgggtgttgtttttgggtagtgttgtactaattgaacactacccgtaggctcgtcagccagaacgatagcaggcttcgataccagagcgcgggcgatggctacacgctgctgctggccgc

SEQ ID NO: 34337 - DNA, 260 bp, Unknown
  Description of Unknown: RightRegion for integrase B8338 sequence
gtcattaaagaaataagaattgacaatgaccagaatatcacgggtgttgtttttgggtagtgttgtactaattgaacactacccgtgggttcatccgctaaaagaatagccggcttataagataatgccctggcaattgctgttctctgctgctgaccgccggataacgtacccggcagtgcatcccgcttatcttctattttcagttgccttaacaattcttctatatatgccttgtccacataacctccatccagctc

SEQ ID NO: 34338 - DNA, 160 bp, Unknown
  Description of Unknown: RightRegion for integrase B8339 sequence
gtcattaaagaaataaggattgacaatgaccagaatatcacgggtgttgtttttgggtagtgttgtactaattgaacactacccgtaggctcatcagctaaaataatctgaggagtattgatcaatgccctcgctattgccacacgctgtttctgccctc

SEQ ID NO: 34339 - DNA, 259 bp, Unknown
  Description of Unknown: RightRegion for integrase B8340 sequence
gtcattaaagaaataagaattgacaatgaccagaatatcacgggtgttgtttttgggtagtgttgtactaattgaacactacccgtaggctcatcagccagtattattggagcatctgataccaatgctctggcaatagctactctttgctgctgtccaccagataatttcataacatttctttttatttgttttttatctaagcctagttcaaacaagatactttcatctgctgatttattcactaatctaatatttt

SEQ ID NO: 34340 - DNA, 260 bp, Unknown
  Description of Unknown: RightRegion for integrase B8341 sequence
gtcattaaggaaataaagattgataatgaccagaatatcacgggtgttgtttttgggtagtgttgtactaattgaacactacccgtaggctcatccgcaaaaattacatccggctttgcaatcaaagcgcgggcaatggctacacgctgctgctggccgccggataactcatggggcagatgttccaagcggccctgaatgccaagcagttctgtaagttgtttcaggtatgcttcatccggtttttgcttatccagcaa

SEQ ID NO: 34341 - DNA, 260 bp, Unknown
  Description of Unknown: RightRegion for integrase B8342 sequence
gtcattaaagaaataaggattgacaatgaccagaatatcacgggtgttgtttttgggtagtgttgtactaatcgaacactacccgtcggttcatctgccagaatcagctgcggacgggtgatcagcgcgcgggcaaccgccgccctctgcttctgtccgccggaaacctcatacggatacttctccagcagcgcgtcgatcccgagcttttcggcaatcggtcaaagcctctcctccatctcctgcaccggcgcatctgc

SEQ ID NO: 34342 - DNA, 260 bp, Unknown
  Description of Unknown: RightRegion for integrase B8343 sequence
gtcattaaagaaataagaattgacaatgaccagaatatcacgggtgttgtttttgggtagtgttgtactaattgaacactacccgtgggctgtgttaagttagtacaaaataaataaccccagcaaatatgcggtctgctggggttcttctttttaattattttcaattatctttgcgcctgctgccagtgctgcttttctgattgcctgtttctgctcttccagcgtctttggcatatccagtttgcgtggctcaaccg

SEQ ID NO: 34343 - DNA, 138 bp, Unknown
  Description of Unknown: RightRegion for integrase B8344 sequence
gtcattaaagaaataagaattgacaatgaccagaatatcacgggtgttgtttttgggtagtgttatactaattgaacactacccgttggttcgtctgccagtatgatcctaggctgattgatcaacgccctcgcgatc

SEQ ID NO: 34344 - DNA, 260 bp, Unknown
  Description of Unknown: RightRegion for integrase B8345 sequence
gtcattaaggaaataaagattgataatgaccagaatatcacgggtgttgtttttgggtagtgttgtactaattgaacactacccgttggctcatcagccaaaattaattcgggatttgttattatcgcacgtgccactgctgccctttgcttctgtcctcctgacacctcatatggatatttattaagcagcttttcaattccaagcagcgaagctataggtgcaagccttttttccatatccctataatccacacctga

SEQ ID NO: 34345 - DNA, 260 bp, Unknown
  Description of Unknown: RightRegion for integrase B8346 sequence
accttaaaagagatccgggtgaataatgccaatgaaattacaggcatctcatttttttaatctgtgttgtactaatcatacataacctgtaggttcgtctgcaagaaacagagaaggcttcgtcaccagcgctcttgcaatggcaactctttgctgctggcctccggaaagctctgtaggacggtggtgcattctatgagacagctctaccttttccagagctttacggactctctcctttctttctgctgctttgactc

SEQ ID NO: 34346 - DNA, 153 bp, Unknown
  Description of Unknown: RightRegion for integrase B8347 sequence
gtcattaaagaaataaggattgacaatgaccagaatatcacgggtgttgtttttgggtagtgttgtactaattgaacactacccgtaggctcatcagctagtattattggagcatctgataccaatgctctggcaatagctactctttgctgc

SEQ ID NO: 34347 - DNA, 95 bp, Unknown
  Description of Unknown: RightRegion for integrase B8348 sequence
gtcattaaagaaataagaattgacaatgaccagaatatcacgggtgttgtttttgggtagtgttgtactaattgaacactacccgttggctcatc

SEQ ID NO: 34348 - DNA, 260 bp, Unknown
  Description of Unknown: RightRegion for integrase B8349 sequence
gtcattaaagaaataaggattgacaatgaccagaatatcacgggtgttgtttttgggtagtgttgtactaattgaacactacccgttggctcatcagccaaaattaattcgggatttgttattatcgcacgtgccactgctgccctttgcttctgtcctcctgacacctcgtatggatatttattaagcagcttttcaattccaagcagtgaagctataggtgcaagccttttttccatatccctatagtccacacctga

SEQ ID NO: 34349 - DNA, 260 bp, Unknown
  Description of Unknown: RightRegion for integrase B8350 sequence
gtcattaaagaaataaggattgacaatgaccagaatatcacgggtgttgtttttgggtagtgttgtactaattgaacactacccgttggctcatcagccaaaattaattcgggatttgttattatcgcacgtgccactgctgccctttgcttctgtcctcctgacacctcgtatggatatttattaagcagcttttcaattccaagcagcgaagctataggtgcaagccttttttccatatccctatagtccacacctga

SEQ ID NO: 34350 - DNA, 260 bp, Unknown
  Description of Unknown: RightRegion for integrase B8351 sequence
gtcattaaagaaataaggattgacaatgaccagaatatcacgggtgttgtttttgggtagtgttgtactaattgaacactacccgtaggctcgtccgccaaaatcagcttaggctgattgataatggctctggcacaggcgcaccgctgcttctggccgccggacacctgatatgggtacttatccagaatatccatgatattcagctttccggccatttcccgcacccgtccatcaatctcgcctgctggaaccttgtt

SEQ ID NO: 34351 - DNA, 260 bp, Unknown
  Description of Unknown: RightRegion for integrase B8352 sequence
gtcattaaagaaataagaattgacaatgaccagaatatcacgggtgttgtttttgggtagtgttgtactaattgaacactacccgtaggctgttctgcaatcagaacttctgggttgtggctgcactctctggctacgactactttctgcatatttccgccggacagcattcccacattctgtcccgtgccggaacagcgtatttcgtaggatttaatgcgctcctccgcaaattttaatatctttttatagttcagaag

SEQ ID NO: 34352 - DNA, 260 bp, Unknown
  Description of Unknown: RightRegion for integrase B8353 sequence
gtcattaaagaaataaggattgacaatgaccagaatatcacgggtgttgtttttgggtagtgttgtactaacttaacactacccgttggctcatcagccaaaattaattcgggatttgttattatcgcacgtgccactgctgccctttgcttctgtcctcctgacacctcgtatggatatttattaagcagcttttcaattccaagcagcgaagctataggtgcaagccttttttccatatccctataatccacacctga

SEQ ID NO: 34353 - DNA, 260 bp, Unknown
  Description of Unknown: RightRegion for integrase B8354 sequence
gtcattaaagaaataagaattgacaatgaccagaatatcacgggtgttgtttttgggtagtgttgtactaattgaacactacccgtgggctcatcacataataatatgtcgggatttttaacaatagccctgcctattgcagttctttgctgttgtccgccagataactggttaggaagcttatgcctgtgctcatacagccctaatgtattaagcagttcgttaatatcaagcggtgaatcgctaagataagcaccaac

SEQ ID NO: 34354 - DNA, 135 bp, Unknown
  Description of Unknown: RightRegion for integrase B8355 sequence
gtcattaaagaaataaagattgataatgaccagaatatcacgggtgttgtttttgggtagtgttgtactaattgaacactacccgtcggttcatcggcaaggatcatttggggatgtaagatcagagcccttgct

SEQ ID NO: 34355 - DNA, 165 bp, Unknown
  Description of Unknown: RightRegion for integrase B8356 sequence
gtcattaaagaaataaggattgacaatgaccagaatatcacgggtgttgtttttgggtagtgttgtactaatttaacactacccgtaggctcgtcgcagagcagtatatccggatttttcacgattgcacgcccgattgacacacgctgctgctgtccaccggat

SEQ ID NO: 34356 - DNA, 260 bp, Unknown
  Description of Unknown: RightRegion for integrase B8357 sequence
gtcattaaagaaataagaattgataatgaccagaatatcacgggtgttgtttttgggtagtgttgtactaattgaacactacccgttggttcatctgccagaatgatgcccggattcaggatcagtgctctggctgctgccagtctctgcttctgtccgcctgacatctgcgatgggaacttatccagtacctcggtgatctccagatatttcgctaactgctccagacgctttccgccctctgcctccgatatgttatg

SEQ ID NO: 34357 - DNA, 260 bp, Unknown
  Description of Unknown: RightRegion for integrase B8358 sequence
gtcattaaagaaataaggattgacaatgaccagaatatcacgggtgctgtttttgggtagtgttgtactaattgaacactacccgtgggttcatccgctaaaagaatagccggcttataagataatgccctggcaattgctgttctctgctgctgaccgccggataacgtacccggcagtgcatcccgcttatcttctattttcagttgccttaacaattcttctatatatgccttgtccacataacctccatccagctc

SEQ ID NO: 34358 - DNA, 260 bp, Unknown
  Description of Unknown: RightRegion for integrase B8359 sequence
gtcattaaagaaataaggattgacaatgaccagaatatcacgggtgttgtttttgggtagtgttgtactaattgaacactacccgtgggttcatcgcacaacagaaggctgggatttttgatcagtgctctggcaatggcacaacgctgctgttgtccaccggacagttgtgcagggaacttgttctgatgttccgtaagaccaagtacctgcaataattcctccagatccaagggatttttcgtcagatactgacagac

SEQ ID NO: 34359 - DNA, 260 bp, Unknown
  Description of Unknown: RightRegion for integrase B8360 sequence
gtcattaaagaaataaggattgacaatgaccagaatatcacgggtgttgtttttgggtagtgttgtactaattgaacactacccgttggctcatctgccaaaattaattcgggatttgttattatcgcacgtgccactgctgccctttgcttctgtcctcctgacacctcatatggatatttattaagcagcttttcaattccaagcagcgaagctataggtgcaagccttttttccatatccctataatccacacctga

SEQ ID NO: 34360 - DNA, 260 bp, Unknown
  Description of Unknown: RightRegion for integrase B8361 sequence
gtcattaaagaaataaggattgacaatgaccagaatatcacgggtgttgtttttgggtagtgttgtactaattgaacactacccgtgggctcatccgccaggatcagggatgggtctcccgccagtgccctggcaatggaaaccctctgctgctggccgccggataactggttgggcagatttttccatttttcctccagtccaacctttgctaacgattttaaggcccgctccttgcgctcctggacagacactccggc

SEQ ID NO: 34361 - DNA, 260 bp, Unknown
  Description of Unknown: RightRegion for integrase B8362 sequence
gtcattaaagaaattagaattgataatgaccagaatatcacgggtgttgtttttgggtagtgttgtactaatgtgacactacccgtgggcagtgttaagttagtacaaatataaaaaggctacacactgactgtgtacccctctgcaacgaaccccagcaagcctgctgcctgccggggttttgttattctcccatattgtctggcacgtcttcttccgtgaccgttctttctcttgcaatcagcttcaacggcaaaaac

SEQ ID NO: 34362 - DNA, 138 bp, Unknown
  Description of Unknown: RightRegion for integrase B8363 sequence
gtcattaaagaaataaggattgacaatgaccagaatatcacgggtgttgtttttgggtagtgttgtactaattgaacactacccgtgggctgtgttaagttggtacaaaacaaagaaccccagcaaggctgctgcctg

SEQ ID NO: 34363 - DNA, 109 bp, Unknown
  Description of Unknown: RightRegion for integrase B8364 sequence
tctataataaatagtgttggtgagaaatcatcagcactatttttgtatggaaatgtataaaaaatagacatagaaatcacattcctataaaatatagttgcaaccaaat

SEQ ID NO: 34364 - DNA, 260 bp, Unknown
  Description of Unknown: RightRegion for integrase B8365 sequence
gtcattaaagaaataaggattgacaatgaccagaatatcacgggtgttgtttttgggtagtgttgtactaattgaacactacccgtgggctgtgttaagttagtacaaaataaagaaccccagcaaatatgcggtctgctggggttcttcttttctaaaactcttcttcgtagccagttgttttccactgtaaaacttcgccgtcgtcgtccacttcgtctggctcctgcactggtctgtatgttctttcttttccctct

SEQ ID NO: 34365 - DNA, 151 bp, Unknown
  Description of Unknown: RightRegion for integrase B8366 sequence
gtcattaaagaaataagaattgacaatgaccagaatatcacgggtgttgtttttgggtagtgttgtactaattgaacactacccgttggctcatcagccaaaattaattcgggatttgttattatcgcacgtgccactgctgccctttgct

SEQ ID NO: 34366 - DNA, 85 bp, Unknown
  Description of Unknown: RightRegion for integrase B8367 sequence
gtcattaaagaaataagaattgataatgaccagaatatcacgggtgttgtttttgggtagtgttgtactaattgaacactacccg

SEQ ID NO: 34367 - DNA, 260 bp, Unknown
  Description of Unknown: RightRegion for integrase B8368 sequence
accttaaaagagatccgggtgaataatgccaatgaaattacaggcatctcatttttttaatctgtgttgtactaatcatacataacctgtaggctcatcggcaagaataaaagccggatcattaataagagctcttccaaccgataccctctgctgctgaccgccggaaagctgtcccggaaggtgctttctcctgttggataatcctgtcatttccacaattcgctccagcttccctgcatccggctttctctggtcca

SEQ ID NO: 34368 - DNA, 260 bp, Unknown
  Description of Unknown: RightRegion for integrase B8369 sequence
gtcattaaagaaataaggattgacaatgaccagaatatcacgggtgttgtttttgggtagtgttgtactaattgaacactacccgtcggctgtgttaagttagtacaaaataaagaaccccagcaaggctgctgcctgccggggtcttctcttactctcccattgtgtctggcacatcttctgtggtcacttttctttctcttgcaatcaacttcaatggcaagaatgggcaatgtctgtatgtttcgtacttgtcgccc

SEQ ID NO: 34369 - DNA, 260 bp, Unknown
  Description of Unknown: RightRegion for integrase B8370 sequence
gtcattaaagaaataaggattgacaatgaccagaatatcacgggtgttgtttttgggtagtgttgtactaattgaacactacccgtgggctgtgttaagttggtacaaatataaaaaggctacacactgactgtgtacccctctgcaacgaaccccagcaagccttctgcctgccggggttttgttattctcccatattgtctggcacgtcttcttccgtgaccgttctttctcttgcaatcagcttcaacggcaaaaac

SEQ ID NO: 34370 - DNA, 260 bp, Unknown
  Description of Unknown: RightRegion for integrase B8371 sequence
gtcattaaagaaataaggattgacaatgaccagaatatcacgggtgttgtttttgggtagtgttgtactaattgaacactacccgtgggctgtgttaagttagtacaaaataaagaaccccagcaagcctgctgcctgccggggttcttctttttattttgtcttgtgcagttctggcgggtgttttctcccatctatccacccggacagtttttgcccgcactccgggcagttttccggttgccccgtgtagtcatcaa

SEQ ID NO: 34371 - DNA, 260 bp, Unknown
  Description of Unknown: RightRegion for integrase B8372 sequence
gtcattaaagaaataaggattgacaatgaccagaatatcacgggtgttgtttttgggtagtgttgtactaattgaacactacccgtaggttcatctgccaggatcagggacggatccccggccaatgccctggctatagaaacacgctgctgctggccgccggataactggtttggcatatttttccatttttctgccagacctactttttctaaagaagccatagcccgctgcctgcgttcttcacttcccactcctgc

SEQ ID NO: 34372 - DNA, 260 bp, Unknown
  Description of Unknown: RightRegion for integrase B8373 sequence
gtcattaaagaaataagaattgacaatgaccagaatatcacgggtgttgtttttgggtagtgttgtactaattgaacactacccgtgggctgtgttaagttagtacaaaatagaagaaccccagcaaggctgctgcctgccggggttcttcttttctaaaactcttcttcgtagccagttgttttccactgtaaaacttcgccgtcgtcgtccacttcgtctggctcctgcactggtctgtatgttctttcttttccctc

SEQ ID NO: 34373 - DNA, 260 bp, Unknown
  Description of Unknown: RightRegion for integrase B8374 sequence
gtcattaaagaaataaggattgacaatgaccagaatatcacgggtgttgtttttgggtagtgttgtactaattgaacactacccgtaggtgcccgggacaaccaaaaggcggccgaacttctcaaaccggatagaacggctctgctccgaaatgaccgtcatcccgtgggacaaaagctcatcctgggcagtggccgtatacagaaactcggtagagtatccgtcccggacaaaagatgtgatgaaacggatgctcttat

SEQ ID NO: 34374 - DNA, 96 bp, Unknown
  Description of Unknown: RightRegion for integrase B8375 sequence
gtcattaaagaaataagaattgacaatgaccagaatatcacgggtgttgtttttgggtagtgttgtactaattgaacactacccgttggctcatcg

SEQ ID NO: 34375 - DNA, 260 bp, Unknown; identical to SEQ ID NO: 34348
  Description of Unknown: RightRegion for integrase B8376 sequence

SEQ ID NO: 34376 - DNA, 260 bp, Unknown
  Description of Unknown: RightRegion for integrase B8377 sequence
agtgttatcaaggaaatacgcgttgatgagcaaagaaatgtgaccattatttttttataattttcgtactactaaccgatattaaccagttggttagtatcagttagtacaataaaaacaccggactgtgtttctcgtccggtgttttactttgttggtatgtattcaatctaagccaatgttattttttattcacaaatcttttttaagaaatcatcatcaacgtcatagtggaccatttttttaatttcctccgcgct

SEQ ID NO: 34377 - DNA, 260 bp, Unknown
  Description of Unknown: RightRegion for integrase B8378 sequence
gtcattaaagaaataaggattgacaatgaccagaatatcacgggtgttgtttttgggtagtgttgtactaattgaacactacccgtgggctcatcagccaaaattaattcgggatttgttattatcgcacgtgccactgctgccctttgcttctgtcctcctgacacctcatatggatatttattaagcagcttttcaattccaagcagcgaagctataggtgcaagccttttttccatatccctatagtccacacctga

SEQ ID NO: 34378 - DNA, 138 bp, Unknown
  Description of Unknown: RightRegion for integrase B8379 sequence
gtcattaaagaaataaggattgacaatgaccagaatatcacgggtgttgtttttgggtagtgttgtactaattgaacactacccgtcggctcatctgcaaatataatttccggacgattcaccagtgctcttgcaatt

SEQ ID NO: 34379 - DNA, 260 bp, Unknown
  Description of Unknown: RightRegion for integrase B8380 sequence
gtcattaaagaaataagaattgacaatgaccagaatatcacgggtgttgtttttgggtagtgttgtactaattgaacactacccgtcggctcatcagccaaaataatatctggattagaaatcaaactacgggctgcggctacacgctgcttttgaccgccggacatttgcgccggaaactttgaaagaacatcagtaattccaagaaatccggctatatcatttaggtgcttttcggctatggaactatctatattgtg

SEQ ID NO: 34380 - DNA, 260 bp, Unknown
  Description of Unknown: RightRegion for integrase B8381 sequence
gtcattaaagaaataagaattgacaatgaccagaatatcacgggtgttgtttttgggtagtgttgtactaatgctacactacccgtcggttcatcagctaaaatcagtttcggttcattgattaaggctctagcacaagcacaacgctgtttttgtccgccagaaacttcataaggaaatttcgataaaatatcacgaatacccaatttatcggcgatagcatgaactcttttctcaatatcagtagggttctgtttgtt

SEQ ID NO: 34381 - DNA, 260 bp, Unknown
  Description of Unknown: RightRegion for integrase B8382 sequence
gtcattaaagaaataaggattgacaatgaccagaatatcacgggtgttgtttttgggtagtgttgtactaattgaacactacccgtcggctcatcagcgaatataactgacggatgtgtaatcagtgcccttgcgattgcaactctctgctgttcaccacctgacatctgtgcaggaaatttatccttacagtaatctatgccaagtgattccattaattcagtgactttctcctcatcagcttgctcactgtcaagaat

SEQ ID NO: 34382 - DNA, 260 bp, Unknown
  Description of Unknown: RightRegion for integrase B8383 sequence
gtcattaaagaaataagaattgacaatgaccagaatatcacgggtgttgtttttgggtagtgttgtactaattgaacactacccgtgggctgtgttaagttagtacaaaatagaaaaccccagcaaggctgctgcctgccggggttcttctttttattttgtcttgtgcagttctggcgggtgttttctcccatctatccacccagatagtttttgcccgcactttgggcacttttccggctgtcctgtgtagtcatcaa

SEQ ID NO: 34383 - DNA, 260 bp, Unknown
  Description of Unknown: RightRegion for integrase B8384 sequence
gtcattaaagaaataaagattgataatgaccagaatatcacgggtgttgtttttgggtagtgttgtactaattgaacactacccgtgggctgtgttaagttagtacaaaataaagaaccccagcaaggctgctgcctgcctgggttcttcttttctaaaactcttcttcgtagccagttgttttccactgtaaaacttcgccgtcgtcgtccacttcgtctggctcctgcactggtctgtatgttctttcttttccctct

SEQ ID NO: 34384 - DNA, 260 bp, Unknown
  Description of Unknown: RightRegion for integrase B8385 sequence
gtcattaaagaaataaggattgacaatgaccagaatatcacgggtgttgtttttgggtagtgttgtactaacttaacactacccgtcggttcatcagctaatatcagttttggtttattgattaaagccctagcacaagcacaacgttgtttttgtccgcccgaaacttcgtaaggaaattttgataaaatatctcgaatacctaatttgtcagcgatagcatgaacccgtttctcaatatcggcagggttctgtttgtt

SEQ ID NO: 34385 - DNA, 260 bp, Unknown
  Description of Unknown: RightRegion for integrase B8386 sequence
ataatatctaaaattgttattgtcaatgacaacattgaaattcagttgaagaatttttagcagtaactatacgccgtgccaatagcatatagttagtgcaaatgccgtatttatcgcattttttaacactcgaaaattgaatatctgaacttgatgtcgcttttgtgtcgcttatgtgtcgcgttaagcggctttttttatgccaaaatttaagcataaggaggacggcaatctatgttttcagatgaagttttagaaaa

SEQ ID NO: 34386 - DNA, 260 bp, Unknown
  Description of Unknown: RightRegion for integrase B8387 sequence
attaaaaatattgtagtttatccagatggaaatttgaaaataaattttttaggatattgattttatttgcactaacaaatactaaccagatggatgattatgagctaatagtatgcgagcagaagaatatttaaccgcttcccgaaaaatttcgcgtggatgagcaatactaataaacaaaaccatatacctaaaatattacatttatacaaatcgatagacaacacaaacatacattcggtataattatattactagga

SEQ ID NO: 34387 - DNA, 260 bp, Unknown
  Description of Unknown: RightRegion for integrase B8388 sequence
atttgcataaaagagattattatcaataaagatgcaattgatatagtttacaatttttagaaaggagacctttttcaccctccatatatcattcctatgataatgggcgaattgcggcgctacctgagggactcaggttcgatccgtgtcagccgttctatgcgtgatctggcttataaagctatgcaggcaagagaaaaacttaccaatgacaattctaaagagcctacaattgagcagatagcaaaagaaatagatgc

SEQ ID NO: 34388 - DNA, 260 bp, Unknown
  Description of Unknown: RightRegion for integrase B8389 sequence
ataatatctaaaattgttattgtcaatgacaacattgaaattcagttgaagaatttttagcagtaactatacgctgtgccaatagcatatagttagtgcaaatgccgtatttatcgcattttttaacacttaaaaattgaatatctgaacttgatgtcgcttttgtgtcacttatgtgtcgcgttaagcggctttttttatgccaaaatttaagcataaggaggacggcaatctatgttttcagatgaaattttagagaa

SEQ ID NO: 34389 - DNA, 109 bp, Unknown
  Description of Unknown: RightRegion for integrase B8390 sequence
attaaaaatattgtggtttatccagatggaaatttgaaaataaattttttaggatattgattttatttgcactaataaatactaaccagatggatgattatgagctaat

SEQ ID NO: 34390 - DNA, 260 bp, Unknown
  Description of Unknown: RightRegion for integrase B8391 sequence
atttgcataaaagagattattatcaataaagatgcaattgatatagtttacaatttttagaaaggagagcttttttcaccctccatatatcatcccaatagcgtatggagggtgaaaaggcactgttactgcgaaatgacaagatacgaagcgattgaaagagcaatagaaattataagtgaaaaagaaggcgttgaaactaaaaccgaaatattgaaaaatttggaaaaagtgaaaatactcctaaaaaatgaatggac

SEQ ID NO: 34391 - DNA, 260 bp, Unknown
  Description of Unknown: RightRegion for integrase B8392 sequence
gaaaagattgtaattgtcaatggaaatgttgaaattcaattgaagaatttttttcactgactatatatcataccgatagcatatagcttgtgaaaatgtcgtgtttatcatactttcaagagttgcaaaaatcagagtgtcgcttaaatgtcgtttctaagacgtttgaagcgtctttttttttgccaaaatttaggtacaaggagggcatgatatgttttcggatgaaatacttgaaaagatttttggaagagatgatg

SEQ ID NO: 34392 - DNA, 109 bp, Unknown
  Description of Unknown: RightRegion for integrase B8393 sequence
atcatcaaagaaatatacattgataaagaaaagcacattaccaaagttatatttttatagaattttgtctgtatattttagcattgtcctgatggtgagaccggagcgg

SEQ ID NO: 34393 - DNA, 260 bp, Unknown
  Description of Unknown: RightRegion for integrase B8394 sequence
aaagaaatccatgtagacccggaaacccgcaagataagcggcttccggctgaatgcctgatgggtgtagtaacttatattactctaccgtgaaatccccctgtccgccagaaaatgctgctgccgtggaaccaaaatcgatgctctggtcgatggaaaggtcttcggtcggatcaaagttgtgctgctttaaaatatattcaaataccatttccggcatgccgcctgccctgccacccagcacttttttgcccttcagca

SEQ ID NO: 34394 - DNA, 260 bp, Unknown
  Description of Unknown: RightRegion for integrase B8395 sequence
ataatatctaaaattgttattgtcaatgacaacattgaaattcagttgaagaatttttagcagtaactatacgccgtgccaatgataattggggagattaggagatacctccgggacaacagccagataagagtatcgcgttcgcttaaagatacggcatataaggcgatttatgccaaagagcgccttatgaaacaaagccagaaagagccgacgattaatgaaattgccgctgaaataggtgtggacaaagaagaaat

SEQ ID NO: 34395 - DNA, 260 bp, Unknown
  Description of Unknown: RightRegion for integrase B8396 sequence
atttgcataaaagagattattatcaataaagatgcgattgatatagtttacaatttttagaaaggaggcttttttcaccctccatatatcattcctatgataatgggcgaattgcggcgctacctgagggactcaggctcaatccgtgtcagccgttcaatgcgtgatctggcttataaagctatgcaggcaagagaaaaacttaccaatgataattctaaagagcctacgattgagcagatagccaaagaaatagacgc

SEQ ID NO: 34396 - DNA, 109 bp, Unknown
  Description of Unknown: RightRegion for integrase B8397 sequence
aaaataattgataaaatttatattaaagaaggcaaaataaaagaagttacttttttgtaacttctttttatgtaaattaattgttcatatcttcaggcgcttctactgg

SEQ ID NO: 34397 - DNA, 109 bp, Unknown
  Description of Unknown: RightRegion for integrase B8398 sequence
aacaccttcactctaaaaagttcggatattgagtcctcagctccaccaagtccactgtaatttcggttacagtggcttttttattatgccgataaaaaacaaaaggacc

SEQ ID NO: 34398 - DNA, 260 bp, Unknown
  Description of Unknown: RightRegion for integrase B8399 sequence
attaaaaatattgtggtttatccagatggaaatttgaaaataaattttttaggatattgattttatttgcactaataaatactaaccagatggatgattatgagctaatagtatgcgagcagaagaatatttaaccgcttcccgaaaaatttcgcgtggatgagcaatactaataaacaaaactatatacctaaaatattacatttatacaaatcgatagacaacacgaacatatattcggtataattatattactagga

SEQ ID NO: 34399 - DNA, 260 bp, Unknown
  Description of Unknown: RightRegion for integrase B8400 sequence
atttgcataaaagagattattatcaacaaagatgcgattgatatagtttacaatttttagaaaggagacttttttcaccctccatatgtcattcctatgataatgggcgaattgcggcgctacctgagggactcaggctcaatccgtgttagccgttcaatgcgtgatctcgcttataaagctatgcaggcaagagaaaaacttaccaatgataattctaaagagcctacgattgagcagatagccaaagaaatagacgc

SEQ ID NO: 34400 - DNA, 260 bp, Unknown
  Description of Unknown: RightRegion for integrase B8401 sequence
ataatatctaaaattgttattgtcaatgacaacattgaaattcaactgaagaatttttagcagtaactatacgctgtgccaatagcatatagttagtgcaaatgccgtatttatcgcattttttaacccttgaaaattgaatatctgaacttgatgtcgcttttatgtcgcttatgtgtcgctttaagcggctttttttatgccaaaatttaagcataaggaggacggaaatctatgttttcagatgaaattttagagaa

SEQ ID NO: 34401 - DNA, 260 bp, Unknown
  Description of Unknown: RightRegion for integrase B8402 sequence
aaagaaatccatgtagacccggaaacccgcaagataagcggcttccggctgaatgcctgatgggtgtagtaacttatattactctactgtgaagtccccctgcccgccggaaaatgctgctgccgtggaaccaaaatcgatgctctggtcgatggaaaggtcttcggtcggatctatgttgtgctgctttaaaatatattcaaataccatttccggcatgccaccagccctgccgcccagcacttttttgcccttcagca

SEQ ID NO: 34402 - DNA, 260 bp, Unknown
  Description of Unknown: RightRegion for integrase B8403 sequence
aaagaaatccgttttgacgaaaatacccataagataagcgggtttaaatttttgatttagaggtgtagtattctatataactcagttgagtttgaacccggcgccactaatctggaaaaagaaggcaaaggatatgtcgttgcctctctcggcaccgacagcggttatgtgccatataccgcattttccgcaaagcaaagttatatcgacaaaaacccggaaatcattcaaggctttacgaacgcactgcaaaaaggaat

SEQ ID NO: 34403 - DNA, 260 bp, Unknown; identical to SEQ ID NO: 34402
  Description of Unknown: RightRegion for integrase B8404 sequence

SEQ ID NO: 34404 - DNA, 223 bp, Unknown
  Description of Unknown: RightRegion for integrase B8405 sequence
attaaaaatattgtggtttatccagatggaaatttgaaaataaattttataggatattgattttatttgcactaacaaatactaaccagatggatgattatgagctaatagtatgcgagcagaagaatatttaaccgcttcccgaaaaatttcgcgtggatgagcaatactaataaacaaaaccatatacctaaaatattacatttatacaaatcgatagaca

SEQ ID NO: 34405 - DNA, 109 bp, Unknown
  Description of Unknown: RightRegion for integrase B8406 sequence
aaaataatagataaaatttatgttaaggatggtaaaataaaagaagttacttttttgtaacttctttctatgtattattgaacaattattcgttcgtttcctctggcgc

SEQ ID NO: 34406 - DNA, 260 bp, Unknown
  Description of Unknown: RightRegion for integrase B8407 sequence
tcatttataaataaaatatatgtagaaaatggcgaaattaaagagattacttttttgtaatctctttgcttattacattatatctctagcattgcaaggctttgcagttagttgttacttaattctggtgctccaactgggcaaacaccttcgcatgttccacatgagatacatgcatctttatttattatatatttatcatcaccttgtgaaatacaagaaactggacagctagctgcacatgctccacaactaataca

SEQ ID NO: 34407 - DNA, 260 bp, Unknown
  Description of Unknown: RightRegion for integrase B8408 sequence
atttgcataaaagagattattatcaataaagatgcaattgatatagtttacaatttttagaaaggagacctttttcaccctccatatatcattccgatagcgtatggagggtgaaaaggcactgttactgcgaaatgacaagatacgaagcgattgaaagagcaatagaaattataagcgaaaaagaaggcgttgaaactaaagccgaaatattgaaaaatttggaaaaagtgaaaatacttctaaagaacgaatggact

SEQ ID NO: 34408 - DNA, 109 bp, Unknown
  Description of Unknown: RightRegion for integrase B8409 sequence
aaaataattgataaaatctatattaaagaaggaaaaataaaagaagttacttttttgtaacttctttttatgtaaattaattgttcatatcttctggagcttcaactgg

SEQ ID NO: 34409 - DNA, 260 bp, Unknown
  Description of Unknown: RightRegion for integrase B8410 sequence
attaaaaatattgtggtttatccagatggaaatttgaaaataaactttataggatattgattttatttgcactaacaaatactaaccagatggatgattatgagctaatagtatgcgagcagaagaatatttaaccgcttcccgaaaaatttcgcgtggatgagcaatactttgattcagtgatcctttgaaaatcgttttctgttggataatgtcattcttggtattcaagtaaatacaaattaaatgttcttgttgca

SEQ ID NO: 34410 - DNA, 143 bp, Unknown
  Description of Unknown: RightRegion for integrase B8411 sequence
tccatcatcgaggaaatccggctagatgataacaagatatcccgaatcatttttaagtgattttttcgcgggattttgtcaggactaacttacctgtctcggtagtgttagggtagttagtccccgaattaaacagaccgtca

SEQ ID NO: 34411 - DNA, 260 bp, Unknown
  Description of Unknown: RightRegion for integrase B8412 sequence
aaagaaatccatgtagacccggaaacccgcaagataagcggcttccagctgaatgcctgatgggtgtagtaacttatattactctaccgtatattataaattactacacctatagaattacgaaatatttttaacaggttttacctcccagacctgcgtaatcattcccgcagcctgtagctgtttctggaatgcctggcactccgccgctgtattgcaaaaaccggcaaccgcagcataaagtgtaccggatacctgca

SEQ ID NO: 34412 - DNA, 109 bp, Unknown; identical to SEQ ID NO: 34396
  Description of Unknown: RightRegion for integrase B8413 sequence

SEQ ID NO: 34413 - DNA, 260 bp, Unknown
  Description of Unknown: RightRegion for integrase B8414 sequence
ataatatctaaaattgttattgtcaatgacaacattgaaattcagttgaagaatttttagcagtaactatacgctgtgccaatagcatatagttagtgcaaacgccgtatttatcgcattttttaacactcgaaaattgaatatctgaacttgatgtcgcttttgtgtcgcttatgtgtcgcgttaagcggctttttttatgccaaaatttaagcataaggaggacggcaatctatgttttcagatgaaattttagagaa

SEQ ID NO: 34414 - DNA, 260 bp, Unknown
  Description of Unknown: RightRegion for integrase B8415 sequence
agagttgtgaggagaatcgagatcaagcgtcactcagtcgacaaggtgtactttgtttaaatttttgtgcaatttttttgtacttactttttgctattatgtcaccttgtcacttgtcatggtaacataatagcaataaaatattaaataatatcaatatatcacacaatgtatgatatatttatcactatacaagtcatacattgtatgatattatatagacataacaaagaaaggaaaccacaaagagtggttaaggt

SEQ ID NO: 34415 - DNA, 260 bp, Unknown
  Description of Unknown: RightRegion for integrase B8416 sequence
aaagaaatccgttttgacgaaaatacccataagataagcgggtttaaatttttgatttagaggtgtagtattttatataactcagttgagtttgaacccggcgctactaatctggaaaaagagggcaaaggatatgtcgttgcctctctcggcaccgacagcggttatgtgccatataccgcattttccgcaaagcaaagttatatcgacaaaaacccggaaatcattcaaggctttacgaacgcactgcaaaaaggaat

SEQ ID NO: 34416 - DNA, 109 bp, Unknown; identical to SEQ ID NO: 34396
  Description of Unknown: RightRegion for integrase B8417 sequence

SEQ ID NO: 34417 - DNA, 260 bp, Unknown; identical to SEQ ID NO: 34402
  Description of Unknown: RightRegion for integrase B8418 sequence

SEQ ID NO: 34418 - DNA, 260 bp, Unknown
  Description of Unknown: RightRegion for integrase B8419 sequence
aaagaaatccatgtagacccggaaacccgcaagataagcggcttccggctgaatgcctgatgggtgtagtaacttatattactctactgtgaaatccccctgtccgccggaaaatgctgctgccgtggaaccaaaatcgatgctctggtcgatggaaagatcttcggtcggatcaatgttgtactgctttaaaatatattcaaataccatttccggcatgccgcctgtcgccatcactacaatgtaaatatttgtccgat

SEQ ID NO: 34419 - DNA, 260 bp, Unknown
  Description of Unknown: RightRegion for integrase B8420 sequence
ataatatctaaaattgttattgccaatgacaacattgaaattcagttgaagaatttttagcagtaactatacgtcgttccaatggcatatagttagtgcaaacgccgtatttatcgcattttttaacacctaaaaattgaatatctgaacttgatgtcgcttttatgtcgcttatgtgtcgctttaagcggctttttttatgccaaaatttaagcataaggaggacggaaatctatgttttcagatgaaattttagagaa

SEQ ID NO: 34420 - DNA, 260 bp, Unknown
  Description of Unknown: RightRegion for integrase B8421 sequence
attatagaaacgattgagattaaaagcaaaaacgaattcgagattaactttttaatttagtgtactaacttggaataacctggtggcttctccggggtagatagccctctttttttcagtaatccaacatcgacagaaagagctttagcagatcgagtaattagaggagaatactatcatcccgctaccaacgctttatggttttatgcacctgctagaggaaccaattgtgcatctacatggtgggatcaaacactagc

SEQ ID NO: 34421 - DNA, 260 bp, Unknown
  Description of Unknown: RightRegion for integrase B8422 sequence
ataatatctaaaattgttattgccaatgacaacattgaaattcagttgaagaatttttagcagtaactatacgctgtgccaatgataattggggagattaggagatacctccgggacaacagccagataagagtatcgcgttcacttaaagatacggcatataaggcgatttatgccaaagagcgccttatgaaacaaagccagaaagagccgacgattaatgaaattgccgctgaaataggtgtggacaaagaagaaat

SEQ ID NO: 34422 - DNA, 260 bp, Unknown
  Description of Unknown: RightRegion for integrase B8423 sequence
atttgcataaaagagattattatcaacaaagatgcgattgatatagtttacaatttttagaaaggagacttttttcaccatccatatgtcattcctatgataatgggcgaattgcggcgctacctgagggactcaggctcaatccgtgtcagccgttcaatgcgtgatctggcttataaagctatgcaggcaagagaaaaacttaccaatgataattctaaagagcctacgattgagcagatagccaaagaaatcgacgc

SEQ ID NO: 34423 - DNA, 260 bp, Unknown
  Description of Unknown: RightRegion for integrase B8424 sequence
tcatttataaataaaatatatgtagaaaatggcgaaattaaagagattacttttttgtaatctctttgcttattacattgtatctctagcattgcaaggctttgcagttagttgttacttaattctggtgcgccaactgggcaaacaccttcgcatgttccacatgagatacatacatctttatttattatatatttgtcatcaccttgtgaaatacaagaaactggacagctagctgcacatgctccacaactaataca

SEQ ID NO: 34424 - DNA, 260 bp, Unknown
  Description of Unknown: RightRegion for integrase B8425 sequence
acgatagtcgttctgccttacggtttcgtacttgcgacccagattaaggataggctttgagcctgtcctttttcttttggtagtcggtagtccgttttaacgaattttccttatatatacatgtaatgcgagggagcgacgagattgcgccttgagtccctttactttttggaaaaatctttttagtttttacgaactaccagtactaccagatagccaaaggccttgcaaatcaaggactttcttcggtagcaggctca

SEQ ID NO: 34425 - DNA, 260 bp, Unknown
  Description of Unknown: RightRegion for integrase B8426 sequence
gaaaagattgtaattgtcaatggaaatgttgaaattcaattgaagaatttttttcactgactatatatcatacctatgattattagcttgtgaaaatgccgtgtttatcatactttcaagagttgtcaaaatcagagtgtcgcttaaatgtcgtttttaagacgtttgaagcgtctttttttttgccaaaatttaggtacaaggagggcatgatatgttttcggatgaaatacttgaaaagatttttggacgagaagatg

SEQ ID NO: 34426 - DNA, 260 bp, Unknown
  Description of Unknown: RightRegion for integrase B8427 sequence
ataatatcaaaaataattatagtcaatggaaatattgaaatacagttgaaaaaattttagcataaactatatgccatcggagtcgcattatgtaagtgctaataacaaatgcgccgtacatatcatgtaaattgacataaaatagaatatttgatagtatatatcatatactaacgatgacaccgatccgagaatgaggattctgtgtcttttttgttttcaggaggaattttcatgattgcacagggaatcagtcttcc

SEQ ID NO: 34427 - DNA, 260 bp, Unknown
  Description of Unknown: RightRegion for integrase B8428 sequence
ataatagacaagataattatagtcaacggaaatgtggaaattcaattaaagaatttttagcacctactatacgccgtgggtatggcatatagtacgttctgatacgccgtatttactacactttttaatataataatttatttcgatgtcgctaaagtgtcatatatttgtcgctttaagcgtctttttttatgcaaaaattaaatcataaaggagtgaggctttatgtttacagacgagattttaaccaaaatattttc

SEQ ID NO: 34428 - DNA, 260 bp, Unknown
  Description of Unknown: RightRegion for integrase B8429 sequence
tcttttatcgatgttataagtattgatggaaattataatattgacattaaatttttataattttttttacacatttgcttgtactaagttactatcaccaccaggttaatgttatttagtacaagcactaaaatagaaagaagtacagtaaaaattatttgtacttctttctttatactattataatattattagatagttttttcggttctgttggccttattactatctggagcatttactgttgcagcagtagatgc

SEQ ID NO: 34429 - DNA, 260 bp, Unknown
  Description of Unknown: RightRegion for integrase B8430 sequence
ataatatcaaaaataattatagtcaatggaaatattgaaatacagttaaaaaaattttagcataaactatatgccataggagtcgcattatgtaagtgctaataataaatgcgccgtacatatcatgtaaattgacataaaatagaatatttgatagtatatattgtatactaacgatgacaccgatctgagaatgaggattctgtgtctttttttattttctggaggaattttcatgattgcacagggaatcagccata

SEQ ID NO: 34430 - DNA, 260 bp, Unknown
  Description of Unknown: RightRegion for integrase B8431 sequence
ataatatcaaaaataattatagtcaatggaaatattgaaatacagttaaaaaaattttagcataaactatatgccataggaactgcattatgtaagtgctaataagtgccgcacgtatcatgtcaataaataacaggagggtaacgatgatctcacagggaattagtcataccgcatatgatgtaatgagagaatacatgattataggagcagaactggacgaactgccagaaaatcagcgtataaaatagttcgcaaat

SEQ ID NO: 34431 - DNA, 260 bp, Unknown
  Description of Unknown: RightRegion for integrase B8432 sequence
ataatatcgaaaattgttattgtcaagggtaacgtggagatacagttaaaagaattttagcagtagctaataatcattggacttgcatatagcgaatgctaatgccgtgtttatcatgttttttaaaaatggaaaattggaatttgtcgctaaattgacgttttgaggtcgcttttggcggctttttttatgccagaatagaatcagaaggagggataacctatgttttctgacgaaattttggaaaaaatatttatcag

SEQ ID NO: 34432 - DNA, 260 bp, Unknown
  Description of Unknown: RightRegion for integrase B8433 sequence
ataatagacaaaatagttatagtcaatggaaatgtggaaattcaattaaagaatttttagcacgtcctatatgctgtgcctatggcatataggacatactgatacgccgtatttactacactttttaattaaataatttatttaaatgtcgctaaagtgtcatatatttgtcgctttgagcgtctttttttatgtcaaaattaaattataaaggagtgatgctttatgtttacagatgaaatattaacaaagatattttc

SEQ ID NO: 34433 - DNA, 260 bp, Unknown
  Description of Unknown: RightRegion for integrase B8434 sequence
ataatatcaaaaataattatagtcaatggaaatattgaaatacagttaaagaaattttagcacaaactatatgccataggaactgcattatgtaagtgctaataatgccgcacgtatcatgttaataaataacaggagggtaacgatgatctcacaaggaattagtcataccgcatatgatgtaatgagagaatacatgattataggagcagaactggacggaaaatatcagataccgatgttagatagatacacagggc

SEQ ID NO: 34434 - DNA, 260 bp, Unknown
  Description of Unknown: RightRegion for integrase B8435 sequence
ataatatcaaaaataattatagtcaatggaaatattgaaatacagttaaaaaaattttagcataaactatatgccataggagtcgcattatgtaagtgctaataatgccgcacgtatcatgttaataaataacaggagggtaacgatgatctcacaaggaattagtcataccgcatatgatgtaatgagagaatacatgattataggagcagaactggacggaaaatatcagataccgatgttagatagatacacagggc

SEQ ID NO: 34435 - DNA, 260 bp, Unknown; identical to SEQ ID NO: 34429
  Description of Unknown: RightRegion for integrase B8436 sequence

SEQ ID NO: 34436 - DNA, 260 bp, Unknown
  Description of Unknown: RightRegion for integrase B8437 sequence
ataatctcaaaaattgtgatagtcaatggaaatgttgaaatacagttaaagagattttagcataacctatacgccatacctacggcatatagttagtgctaataagtgtcgcacgtatcatgtcaataaataacaggaggataacgatgatctcacagggaattagccataccgcatatgacgtaatgcgagagtacatgattacaggagccgaactggacggcaaataccaaattccaatgatggaacgatacacagac

SEQ ID NO: 34437 - DNA, 260 bp, Unknown; identical to SEQ ID NO: 34436
  Description of Unknown: RightRegion for integrase B8438 sequence

SEQ ID NO: 34438 - DNA, 260 bp, Unknown
  Description of Unknown: RightRegion for integrase B8439 sequence
ataatatcaaaaataattatagtcaatggaaatattgaaatacagttaaagaaattttagcacaaactatatgccataggagtcgcattatgtaagtgctaataataaatgcgccgtacatatcatgtaaattgacataaaatagaatatttgatagtatatattgtatactaacgatgacaccgatctgagaatgaggattctgtgtctttttttattttcgggagaaattttcatgattgcacagggaatcagccata

SEQ ID NO: 34439 - DNA, 260 bp, Unknown
  Description of Unknown: RightRegion for integrase B8440 sequence
ataatatcgaaaattgttattgtcaagggtaacgtggagatacagttaaaagaattttagcagtagctaataatcattggtcttgcatatagcgaatgctaatgccgtgtttatcgtgtttttttaaaatgggaaattggaatttgtcgctaaattgacgttttgaagtcgcttttagcggctttttttatgccagaataaaatcagaaggagggataacatatgttttctgacgaaattttggaaaaaatatttatcag

SEQ ID NO: 34440 - DNA, 260 bp, Unknown
  Description of Unknown: RightRegion for integrase B8441 sequence
ataatagacaagataattatagtcaacggaaatgtggaaattcaattaaagaatttttagcacctactatacgccgtgggtacagcgtaggtactgaatttgacatccagtgtctgatcgaaattatccagtgctttgatcagcccgatgcagccgacctgaaaaaggtcatcggagctttcgatgttgttgccggagaaccgttggatcacactcagaacaagtcggaggtttccacggataaattcttctctggcact

SEQ ID NO: 34441 - DNA, 260 bp, Unknown
  Description of Unknown: RightRegion for integrase B8442 sequence
ataatctcaaaaattgtgatagtcaatgggaatgttgaaatacagttaaagagattttagcataacctatacgccatccctatggcatatagttagtgctaataagtgtcgcacgtatcatgtcaataaataacaggaggataacgatgatctcacagggaattagccataccgcatatgatgtaatgcgagagtacatgattacaggagccgaactggacggcaaataccaaattccgataatggaacgatacacagac

SEQ ID NO: 34442 - DNA, 260 bp, Unknown
  Description of Unknown: RightRegion for integrase B8443 sequence
ataatatcaaaaataattatagtcaatggaaatattgaaatacagttgaagaaattttagcacaaactatatgccataggaactgcattatgtaagtgctaataaatgccgcacgtatcatgtcaataaataacaggagggtaacgatgatctcacagggaattagtcataccgcatatgatgtaatgagagaatacatgattataggagcagaactggacgaactgccagaaaatcagcgtataaaatagttcgcaaat

SEQ ID NO: 34443 - DNA, 260 bp, Unknown
  Description of Unknown: RightRegion for integrase B8444 sequence
ataatatcaaaaataattatagtcaatggaaatattgaaatacagttaaagaaattttagcacaaactatatgccataggagtcgcattatgtaagtgctaataataaatgcgccgtacatatcatgtaaattgacataaaatagaatatttgatagtatatattgtatactaacgatgacaccgatctgagaatgaggattctgtgtctttttttattttcgggaggaattttcatgattgcacagggaatcagccata

SEQ ID NO: 34444 - DNA, 260 bp, Unknown
  Description of Unknown: RightRegion for integrase B8445 sequence
ataattgataagattgttatagtcaatggaaacatagaaatacaattaaagaatttttagcacatactatacgctgtgcctacggcggtatgctagtgctaatgccgtatttatcgtactttttacaattaaataaaatcaaactgtcgtttttgtgtcgttaaactgtcgtttttctgtcgctttaagcggctttttttatgtgaaaataaaattacaaaaaggagagtgattgaagtgtacgacgaagatttaagaga

SEQ ID NO: 34445 - DNA, 260 bp, Unknown
  Description of Unknown: RightRegion for integrase B8446 sequence
ataatatctaagattgtaattgtcaataatgatattgaaatacaattaaaaaacttttagaacgtaacgccataacgatggcattgcgtagagatatactgttagcagaagcatagtgcaagacctatggcgaatagtctctgctaatttgatgccgcatatatcacggttttaagccatttttgaaaaatgaatgtcgctaaagtgtcgcttttatgtcactattagcgtctttttttatgcaaaaatttatacataag

SEQ ID NO: 34446 - DNA, 260 bp, Unknown
  Description of Unknown: RightRegion for integrase B8447 sequence
ataatatcaaaaataattatagtcaatggaaatattgaaatacagttaaaaaatttttagcataaactatatgccataggaactgcattatgtaagtgctaataagtgccgcacgtatcatgtcaataaataacaggagggtaacgatgatctcacagggaattagtcataccgcatatgatgtaatgagagaatacatgattataggagcagaactggacggactggcagaaaaacagcgtgtaaaaatggttcacaaa

SEQ ID NO: 34447 - DNA, 260 bp, Unknown; identical to SEQ ID NO: 34433
  Description of Unknown: RightRegion for integrase B8448 sequence

SEQ ID NO: 34448 - DNA, 260 bp, Unknown; identical to SEQ ID NO: 34443
  Description of Unknown: RightRegion for integrase B8449 sequence

SEQ ID NO: 34449 - DNA, 260 bp, Unknown
  Description of Unknown: RightRegion for integrase B8450 sequence
ataatatcaaaaataattatagtcaatggaaatattgaaatacagttgaagaaattttagcacaaactatatgccataggagtcgcattatgtaagtgctaataacaaatgcgccgtacatatcatgaaattgacataaaatagaatatttgatagtatatattgtatactaacgatgacaccgatccgagaataaggattctgtgtcttttttgttttcaggaggaattttcatgattgcacagggaatcagtcatacc

SEQ ID NO: 34450 - DNA, 260 bp, Unknown; identical to SEQ ID NO: 34443
  Description of Unknown: RightRegion for integrase B8451 sequence

SEQ ID NO: 34451 - DNA, 260 bp, Unknown
  Description of Unknown: RightRegion for integrase B8452 sequence
ataatatctaagattgtaattgtcaataatgatattgaaatacaattaaaaaacttttagaacgtaacgccataacgatggcattgcgtagagatatactgttagcagaagcatagcgcaagacctatgattatcggtgagatccggcgttttttacgggataacagcagtatccgtgtcagcagatccttaaaggataccgcctataaagccatatatgccaaagaaaccatgatgaaacaggggatgagggagccgac

SEQ ID NO: 34452 - DNA, 260 bp, Unknown
  Description of Unknown: RightRegion for integrase B8453 sequence
attatcaaagagatttacataaacgataagcgggagattgtgcggatagtttttttataacttttgttggactaagtactacgctcccgttggagcgtataacttagtacaactaaaaaagcccgctttcgcaggctcatgatttatattttcattcatcgaacgatagaagaaattcttctacgtcttctatcgttcccagctccaccggatcttcctgcgggttaaatccgtaccagaagattccttctttttcgtaa

SEQ ID NO: 34453 - DNA, 260 bp, Unknown
  Description of Unknown: RightRegion for integrase B8454 sequence
ataatatcaaaaataattatagtcaatggaaatattgaaatacagttgaagaaattttagcacaaactatatgccataggagtcgcattatgtaagtgctaataataaatgcgccgtacatatcatgtaaattgacataaaatagaatatttgatagtatatattgtatactaacgatgacaccgatctgagaatgaggattctgtgtctttttttattttctggaggaattttcatgattgcacagggaatcagccata

SEQ ID NO: 34454 - DNA, 260 bp, Unknown; identical to SEQ ID NO: 34431
  Description of Unknown: RightRegion for integrase B8455 sequence

SEQ ID NO: 34455 - DNA, 260 bp, Unknown
  Description of Unknown: RightRegion for integrase B8456 sequence
ataatctcaaaaattgtgatagtcaatggaaatgttgaaatacagttaaagagattttagcataacctatacgccatacctacggcatacagttagtgctaatgagtgtcgcacatatcatgtcaataaataacaggagggtaacgatgatctcacagggaattagccataccgcatatgatgtaatgcgagagtacatgattacaggagccgaactggacggcaaataccaaattccgatgatggaacgatatacagac

SEQ ID NO: 34456 - DNA, 260 bp, Unknown
  Description of Unknown: RightRegion for integrase B8457 sequence
ataatagataaaattgttatagtcaatggaaatatcgaaatacagttaaagaatttttagcacttactatatgcagttcctatgacataatgttagtgctaatgccgtatttatcacgttttacaattatataattttagtgctgtcgcttatatgtcgtacatatgtctatcatatgtcgctttaagcgtctttttttatgccaaaatataatcagaaagagaggtaatgcggatgttttctgatgaagttagagaaaa

SEQ ID NO: 34457 - DNA, 260 bp, Unknown
  Description of Unknown: RightRegion for integrase B8458 sequence
ataatagacaagataattatagtcaatggtaatgttgaaattcagttaaagaatttttagcacctagtacatatcataggagtcgcaggcagtaggtactgaagtgccgtatttactacactttttaaacaaaatacttttttgaatgtcgccaatgtgtcatgaatgtgccactttgagcgtctttttttatgcaaaaatctaagcataaggagtggttctcatgttttcagatgaaatcctagaaaaaatttattcaa

SEQ ID NO: 34458 - DNA, 260 bp, Unknown; identical to SEQ ID NO: 34443
  Description of Unknown: RightRegion for integrase B8459 sequence

SEQ ID NO: 34459 - DNA, 260 bp, Unknown
  Description of Unknown: RightRegion for integrase B8460 sequence
ataatagacaagataattatagtcaatggaaatgtagaaattcaattaaagaatttttagcacctactatacgccgtgggtatggcatatagtacgtactgatacgccgtatttactacactttttaatataataatttattttgatgtcgctaaagtgtcatatatttgtcgcttttagcgtctttttttatgcaaaaattaaatcataaaggagtgatgatctatgtttacggacgagattttaacaaaaatattttc

SEQ ID NO: 34460 - DNA, 260 bp, Unknown
  Description of Unknown: RightRegion for integrase B8461 sequence
ataatagataaaattgttatagtcaatggaaatatcgaaatacagttaaagaatttttagcacttactatatgcagttccaatgattactggggagattaagaggtatcttcgtgataacagtgcaataagagtaagccgttcattaaaggatatggcttataaggcactttatacaaaagaacagctattaaagagcaggcagaaggaaccgacaatatcggagattgcaagtgagataggagcatctaaggaggatat

SEQ ID NO: 34461 - DNA, 260 bp, Unknown; identical to SEQ ID NO: 34433
  Description of Unknown: RightRegion for integrase B8462 sequence

SEQ ID NO: 34462 - DNA, 260 bp, Unknown
  Description of Unknown: RightRegion for integrase B8463 sequence
ataatatcaaaaataattatagtcaatggaaatattgaaatacagttgaagaaattttagcacaaactatatgccataggagtcgcattatgtaagtgctaataatgccgcacgtatcatgttaataaataacaggagggtaacgatgatctcacaaggaattagtcataccgcatatgatgtaatgagagaatacatgattataggagcagaactggacggaaaatatcagataccgatgttagatagatacacagggc

SEQ ID NO: 34463 - DNA, 260 bp, Unknown; identical to SEQ ID NO: 34429
  Description of Unknown: RightRegion for integrase B8464 sequence

SEQ ID NO: 34464 - DNA, 260 bp, Unknown
  Description of Unknown: RightRegion for integrase B8465 sequence
attatcaaagagatttacataaacgataagcgggagattgtgcggatagtttttttataacttttgttggactaagcactacgctcccgtcggtgcatggtagttagtacaaaaaagagcggtgactccgctctaaattctctatttataatatccagggcattcacattctgcataaatccatgtcccggggatttctttaacgtcaaacgtgaaatctaaacacccgtcagcgatgtcaatttcccatccggtgatgg

SEQ ID NO: 34465 - DNA, 260 bp, Unknown
  Description of Unknown: RightRegion for integrase B8466 sequence
ctcaaaataaaagaaatccggctatacaaagaccgccggattgaatttgattttctgtaagtacttagtttatataaaccttttcccaaggtgcggtataccgagcgtccggacgtggccacggcgtgtatcatggagggcgatgtggtggtgctggtggacaattcagcgtcggccctgctgctgcccacaacgatcctgcggttcaacgaggagatcaacgactactacttcccgcccctcatcggcacgtatctgca

SEQ ID NO: 34466 - DNA, 260 bp, Unknown
  Description of Unknown: RightRegion for integrase B8467 sequence
ataatatcaaaaataattatagtcaatggaaatattgaaatacagttaaaaaaattttagcataaactatatgccataggagtcgcattatgtaagtgctaataacaaatgtgccgtacatatcatgtaaattgacataaaatagaatatttgatagtatatattgtatgctaacgatgacaccgatctgagaatgaggattctgtgtctttttttattttcgggaggaattttcatgattgcacagggaatcagccata

SEQ ID NO: 34467 - DNA, 260 bp, Unknown
  Description of Unknown: RightRegion for integrase B8468 sequence
ataatatctaagattgtaattgtcaataatgatattgaaatacaattaaaaaacttttagaacgtaacgccataacgatggcattgcgtagagatatactgttagcagaagcatagcgcaagacctatggcgaatagtctctgctaattttatgccgcatatatcacggttttaagccatttttgaaaaatgaatgtcgctaaagtgtcgcttttatgtcactattagcgtctttttttatgcaaaaatttatacataag

SEQ ID NO: 34468 - DNA, 260 bp, Unknown
  Description of Unknown: RightRegion for integrase B8469 sequence
ataatctcaaaaattgtgatagtcaatggaaatgttgaaatacagttaaagagattttagcataacctatacgccatacctacggcatatagttagtgctaataagtgtcgcacgtatcatgtcaataaataacaggaggtaacgatgatctcacagggaattagccataccgcatacgatgtaatgcgagagtacatgattacaggagccgaactggacggcaaataccaaattccaatgatggaacgatacacagacc

SEQ ID NO: 34469 - DNA, 109 bp, Unknown
  Description of Unknown: RightRegion for integrase B8470 sequence
attcaagaaatatatttcgatgaaaacaataaactgagtggctttaaattccttatctagccactcaggctatatttgtttacggtgtagtaatctttataacacaacg

SEQ ID NO: 34470 - DNA, 260 bp, Unknown; identical to SEQ ID NO: 34462
  Description of Unknown: RightRegion for integrase B8471 sequence

SEQ ID NO: 34471 - DNA, 260 bp, Unknown
  Description of Unknown: RightRegion for integrase B8472 sequence
ataatagacaaaatagttatagtcaacggaaatgtggaaattcaattaaagaatttttagcacctactatacgccgtgggtatgacatatagtacgtactgatacgccgtatttactacacttttaatataatatactttgattcaatgtcgctaaagtgtcatatatttgtcgctttgagcgtctttttttatgtaaaaattaaatcataaaggagtgatgctctatgtttacagatgagattttaacaaaaatatttg

SEQ ID NO: 34472 - DNA, 260 bp, Unknown
  Description of Unknown: RightRegion for integrase B8473 sequence
ataatctcaaaaattgtgatagtcaatggaaatgttgaaatacagttaaagagattttagcataacctatacgccatacctacggcatatagttagtgctaataagtgtcgcacgtatcatgttaataaataacaggaggataacgatgatctcacagggaattagccataccgcatatgacgtaatgcgagagtacatgattacaggagccgaactggacggcaaataccaaattccaatgatggaacgatacacagac

SEQ ID NO: 34473 - DNA, 260 bp, Unknown
  Description of Unknown: RightRegion for integrase B8474 sequence
ataatctcaaaaattgtgatagtcaatggtaacgttgaaatacagttaaagagattttagcataacctgtatgccatacctacggcatatagttagtgctaatgagtgtcgcacgtatcatgtcaataaacaacaggaggataacgatgatctcacagggaattagccataccgcatatgatgtaatgcgagagtacatgattacaggagccgaactggacggcaaataccaaattccgatgatggaacgatatacagac

SEQ ID NO: 34474 - DNA, 260 bp, Unknown; identical to SEQ ID NO: 34440
  Description of Unknown: RightRegion for integrase B8475 sequence

SEQ ID NO: 34475 - DNA, 260 bp, Unknown
  Description of Unknown: RightRegion for integrase B8476 sequence
ataatatcaaaaataattatagtcaatggaaatattgaaatacagttaaaaaaattttagcataaactatatgccatcggagtcgcattatgtaagtgctaataatgccgcacgtatcatgttaataaataacaggagggtaacgatgatctcacaaggaattagtcataccgcatatgatgtaatgagagaatacatgattataggagcagaactggacggaaaatatcagataccgatgttagatagatacacagggc

SEQ ID NO: 34476 - DNA, 260 bp, Unknown
  Description of Unknown: RightRegion for integrase B8477 sequence
ataatatctaagattgtaattgtcaataatgatattgaaatacaattaaaaaacttttagaacgtaacgccataacgatggcattgcgtagagatatactgttagcagaagcataacgcaagacctatggcgaatagtctctgctaatttgatgccgcatatatcacggttttaagccatttttgaaaaatgaatgtcgctaaagtgtcgcttttatgtcactattagcgtctttttttatgcaaaaatttatacataag

SEQ ID NO: 34477 - DNA, 260 bp, Unknown
  Description of Unknown: RightRegion for integrase B8478 sequence
ataatctcaaaaattgtgatagtcaatggaaatgttgaaatacagttaaagagattttagcataacctatacgccataccaatgatcattggagagatgaaacgcttcttccgggatgacgggatgataaaggtaagccgggctataaaggaatgtagacacagagtctatcaggcacgggagaaaattgagagagaatccgggcgggagccgacgatccaggaactttcggaaacacttggaattgcggcggaagaagt

SEQ ID NO: 34478 - DNA, 260 bp, Unknown; identical to SEQ ID NO: 34440
  Description of Unknown: RightRegion for integrase B8479 sequence

SEQ ID NO: 34479 - DNA, 260 bp, Unknown
  Description of Unknown: RightRegion for integrase B8480 sequence
ataatatcgaaaattgttattgtcaagggtaacgtggagatacagttaaaagaattttagcagtagctaataatcattggacttgcatatagcgaatgctaatgccgtgtttatcgtgtttttttaaaatgggaaattggaatttgtcgctaaattgacgttttgaagtcgcttttagcggctttttttatgccagaataaaatcagaaggagggataacatatgttttctgacgaaattttggaaaaaatatttatcag

SEQ ID NO: 34480 - DNA, 260 bp, Unknown
  Description of Unknown: RightRegion for integrase B8481 sequence
ataatctcaaaaattgtgatagtcaatggaaatgttgaaatacagttaaagagattttagcataacctatacgccataccaatgatcattggagagatgaaacgcttcttccgggatgacgggatgataaaggtaagccgggctataaaggaatgtagacacagagtctatcaggcacgggagaaaattgagagagaatccgggcgggagccgacgatccaggaactttcggaaacactcggaatcgcggcggaagaagt

SEQ ID NO: 34481 - DNA, 260 bp, Unknown
  Description of Unknown: RightRegion for integrase B8482 sequence
ataatagacaaaatagttatagtcaacggaaatgtggaaattcaattaaagaatttttagcacctactatacgccgtgggtatggcatatagtacgtactgatacgccgtatttactacacttttaatataataaacttgattcaatgtcgctaaagtgtcatatatttgtcgctttgagcgtctttttttatgccaaaattaaatcataaaggagtgatactttatgtttacaagcgaaattttaacaaaaatatttgc

SEQ ID NO: 34482 - DNA, 260 bp, Unknown
  Description of Unknown: RightRegion for integrase B8483 sequence
ataatatcaaaaataattatagtcaatggaaatattgaaatacagttgaaaaaattttagcacaaactatatgccatcggagtcgcattatgtaagtgctaataacgaatgcgccgtacatatcatgtaaattgacataaaatagaatatttgatagtatatatcatatactgacgatgacaccgatccgagaatgaggattctgtgtctttttttattttcgggaggaattttcatgattgcacagggaatcagccata

SEQ ID NO: 34483 - DNA, 260 bp, Unknown
  Description of Unknown: RightRegion for integrase B8484 sequence
aatacgctcactatctcgagttcggatattgagcgcacagctccattttggaacatctaaaaaagctgatgattatccatattcggataatcaccagcttttctttttatactatttcatcgactatatttattcagccattcttttctgaaccagttcaaattcatccgtgatttctttggaaggtgccttagtcgcaagacttaccagcacgatcatcgcgcaggataccaggaaagccggaagtaattcatagaaat

SEQ ID NO: 34484 - DNA, 260 bp, Unknown
  Description of Unknown: RightRegion for integrase B8485 sequence
ataatatcaaaaataattatagtcaatggaaatattgaaatacagttgaagaaattttagcataaactatatgtcataggaactgcattatgtaagtgctaataagtgccgcacatatcatgttaacaaataacaggagggaaatgatgatctcacagggaattagtcataccgcatatgatgtaatgagagaatacatgattataggagcagaactggacggaaaatatcagataccgatgttagatagatatacaggg

SEQ ID NO: 34485 - DNA, 260 bp, Unknown
  Description of Unknown: RightRegion for integrase B8486 sequence
ataatctcaaaaattgtgatagtcaatggaaatgttgaaatacagttaaagagattttagcataacctatacgccatccctacggcatatagttagtgctaataagtgtcgcacgtatcatgtcaataaataacaggagggtaacgatgatctcacagggaattagccataccgcatatgatgtaatgcgagagtacatgattacaggagccgaactggacggcaaataccaaattccaatgatggaacgatacacagac

SEQ ID NO: 34486 - DNA, 260 bp, Unknown; identical to SEQ ID NO: 34479
  Description of Unknown: RightRegion for integrase B8487 sequence

SEQ ID NO: 34487 - DNA, 260 bp, Unknown
  Description of Unknown: RightRegion for integrase B8488 sequence
ataatatcgaaaattgttattgtcaagggtaacgtggagatacagttaaaagaattttagcagtagctaataatcattggaacagcataagttgaaaaccgtactcccagttcggtattgaaatggtcgattgccttgatcagaccgatacagccaatctgaaatagatcgtctacgttttcccctgcagaggaaaagcgtcggatgacgctcaaaacgagccgcagatttcccttgataaactgttcccgtgcctcggc

SEQ ID NO: 34488 - DNA, 260 bp, Unknown
  Description of Unknown: RightRegion for integrase B8489 sequence
atcattaaaaagatcgttattactaatgaaaacgtcaatattttattaaatgaattatgattgcagaaatataaactccatgcacatagaattaatatttctgcaatcaaaaagtccctggggcatacgtcccagggccgtcttttatacttgtactttctgatatcgcttcagcaaaataaaagcataatcgttttggctgggcggtgtatccagcatctctggtactcttttcagagtgcgtcgggaaccatttccga

SEQ ID NO: 34489 - DNA, 260 bp, Unknown
  Description of Unknown: RightRegion for integrase B8490 sequence
ataattgataagattgttatagtcaatggaaacatagaaatacaattaaagaatttttagcacatactatatgctgtgccaatggcgttaagttagtgctaatgccgtgtttatcgtactttttacaattaaataaaatcaaggtgtcgtttttgtgtcgttaaactgtcgtttttctgtcgctttaagcggctttttttatgtgaaaataaaattacaaaaaggagagtgattgaagtgtacgacgaagatttgagaga

SEQ ID NO: 34490 - DNA, 260 bp, Unknown
  Description of Unknown: RightRegion for integrase B8491 sequence
ataatatcgaaaattgttattgtcaagggtaacgtggagatacagttaaaagaattttagcagtagctaataatcattgggacagcataagttgaaaaccgtactcccagttcggtattgaaatggtcgattgccttgatcagaccgatacagccaatctgaaatagatcgtctacgttttcccctgcagaggaaaagcgtcggatgacgctcaaaacgagccgcagatttcccttgataaactgttcccgtgcctcggc

SEQ ID NO: 34491 - DNA, 260 bp, Unknown
  Description of Unknown: RightRegion for integrase B8492 sequence
ataatatcaaaaataattatagtcaatgggaatattgaaatacagttaaagaaattttagcacaaactatatgccatcgggactgcatatgtcgagaatttgacattcagtgtatcgtcaaaattatcgacggctttcataagaccaatgcacccgatctgaaaaagatcatcggcattttcattgctgttctgaaatcgtttgataacacttaacacaaggcggagatttcctttgatatattgttcgcgggcttcaga

SEQ ID NO: 34492 - DNA, 260 bp, Unknown
  Description of Unknown: RightRegion for integrase B8493 sequence
ataatagataagattattatagtcaatggaaatatcgaaatacaattaaagaatttttagcagaaacttaatgccattggcatggcatataggaagtgctaatgccgcatttatcacgtttttataattgcataattttaataatgtcgcttatgtgtcatatatatgtctattatatgtcgctatgagcgtctttttttatgccaaaatataatcagaaagagaggtagtgtaaatgttttctgatgaagttagagaaa

SEQ ID NO: 34493 - DNA, 260 bp, Unknown
  Description of Unknown: RightRegion for integrase B8494 sequence
ataattgataaggtgattgtaggcaaggacgatatagaaattcagctaaaaaacttttagcacttacataatgcagttcctatggcgttaaggtggtgctataccgcatatacactacattctttttgacacaagacgcataatgcgtcttttttattgctattttttaggctatatgttatgttgaatgtgtacttaggaggtatattgatgattgatatatctaagctgataaaggctgaatatgagtacataagatt

SEQ ID NO: 34494 - DNA, 132 bp, Unknown
  Description of Unknown: RightRegion for integrase B8495 sequence
ataatatcaaggattgtgattgtcaatggagatgttgaaattcaattaaagaatttttagcagaacctattgttataggaaccgcataggtagagaacttcacacccagagtagcgtcgaaattgtcaatgg

SEQ ID NO: 34495 - DNA, 109 bp, Unknown
  Description of Unknown: RightRegion for integrase B8496 sequence
ataatatcaaggattgtaattgtcaatggtgatgtcgaaattcaattaaagaatttttagcagaacctattgttatcggaaccgcataggtagagaacttcacacccag

SEQ ID NO: 34496 - DNA, 80 bp, Unknown
  Description of Unknown: RightRegion for integrase B8497 sequence
ataatagataaagttattatagtcaatggaaatgttgaaattcagttaaagaatttttagcatatacttaatgctacggg

SEQ ID NO: 34497 - DNA, 260 bp, Unknown
  Description of Unknown: RightRegion for integrase B8498 sequence
ataattgacaagatagtaattgtcaatgggaatattgaaatacagcttaagaatttttagcataaacttaatgcagttcctatagcatataggaagtgctaatgccgcatttatcacgttttacaattatataatttcagcattgtcgcttatatgtcgcacatatgtctattatgtgtcgctataagtgattttttttatgcaaaaatgtaactagaaagagaggtaatgtgaatgttttctgatgaagttagagaaaa

SEQ ID NO: 34498 - DNA, 260 bp, Unknown
  Description of Unknown: RightRegion for integrase B8499 sequence
attatagaccgtatcacaattgatgatgataatgtcaatatcaaactaaaacatctatgatttaatttgcaagttttcaaatactatgtgtatgggattcggatgcaacgcagcgggcattgtgggatgccgtatcattgattcccccagagaacggcttattgccatgataaccaacaactttgtgccatgcaacggaaggtttccgccaccatacaaagggaaacaaaaatgttcctcggcgctgacaatgaagaaac

SEQ ID NO: 34499 - DNA, 260 bp, Unknown
  Description of Unknown: RightRegion for integrase B8500 sequence
ataatagataagattgttatagtcaatggaaatattgaaatacagttaaagaatttttagcagaaacttaatgccatgggcatggcatataggaagtgctaatgccacatttatcacattttaataattgcataattttaacaatgtcgtttatatgtcgtacacatgtctattatgtgtcgctataagcgtctttttttatgtcaaaattaagtcagaaagagaggtaatgtgaatgttttctgatgaagttagagaaa

SEQ ID NO: 34500 - DNA, 260 bp, Unknown
  Description of Unknown: RightRegion for integrase B8501 sequence
ataatagacaaaattgttatagtcaatggaaatatcgaaattcaattaaaaaatttttagcacaaacttaatgctgtgcccatgataattggggagataagacgttttttgagagataacagccagatacgggtgtcgaggtcgcttaaagatgtggcattcagggcaatatatgccaaagaaagaattatgaaaacagggaaggatgaacccacggttaatgaacttgccacggaaataggtgtaagcaaagaagaact

SEQ ID NO: 34501 - DNA, 260 bp, Unknown
  Description of Unknown: RightRegion for integrase B8502 sequence
ctccgcggctttccgggcaagtggtgctttgcgcgcacgcaaaaggcggcgtctccgtgaatacggagacgccgcccgcggctgtcaaaaagtattactttttgacaaagggggtttgcggcctgactgcagcgcacgcgccgtccgcccaagacggacggcgcgcacgtttgcaggccgagaagtattttctcagccgcacatgtcgcctgagaaaatgatccgactttctttcgccgctccggcggcgaaactctacg

SEQ ID NO: 34502 - DNA, 79 bp, Unknown
  Description of Unknown: RightRegion for integrase B8503 sequence
ataatagataggattgttatagtcaatggaaatattgaaatacagttaaagaatttttagcagaaacttaatgccatgg

SEQ ID NO: 34503 - DNA, 260 bp, Unknown
  Description of Unknown: RightRegion for integrase B8504 sequence
ataatatcaaggattgtgattgtcaatggtgatgttgaaattcaattaaagaatttttagcagaacatattgttattggagtggcaataggatgtgctaatgccgtatttatcatacttttaaaactgcatattttttcgtttgtcgcaaaagtgtcgtatatgtgtcactatatgcgactttttttatgccaaaatttaatcataaggagggatgaccttatgggaaaattcaaattttcagatgaaacactggaacat

SEQ ID NO: 34504 - DNA, 260 bp, Unknown
  Description of Unknown: RightRegion for integrase B8505 sequence
ataattgaaaaaatagtaattagcaatggaaatattgagataaaattgaaagatttttagcactactataatgctatcctatggtatatatttactgctaatataggtatattaatttagcagtaaaatagtaccatacccatggcatggggttagtgctaatgcgcatatttactacacttttgagtcattatagtggcaattattagtcgctattaatggctctttttgttttatgataattacaaagggaggaataa

SEQ ID NO: 34505 - DNA, 260 bp, Unknown
  Description of Unknown: RightRegion for integrase B8506 sequence
ataatagacaaaattgttatagtcaatggaaatatcgaaattcaattaaaaaatttttagcacaaacttaatgccgtgcctatggcatatgggaagtgctaatgccgtatttatcacgtttttacaactgcataattttaaaaatgtcgcttatgtgtcatatatgtgtctattatatgtcgctataagcgtctttttttatgcaaaaatacagtcagaaagagaggtaatgcgaatgttttctgatgaagttagagaga

SEQ ID NO: 34506 - DNA, 260 bp, Unknown
  Description of Unknown: RightRegion for integrase B8507 sequence
ataatagacaaaattgttatagtcaatggaaatatcgaaattcaattaaaaaatttttagcacaaacttaatgccgtgcctatggcatataggaagcgctaatgccgtatttatcacgttttaacaactgcataattttaaaaatgtcgcttatgtgtcatatatgtgtctattatatgtcgctataagcgtctttttttatgccaaaattaagctagaaagagaggtagtgcgaatgttttctgatgaagttagagaaa

SEQ ID NO: 34507 - DNA, 260 bp, Unknown
  Description of Unknown: RightRegion for integrase B8508 sequence
ataatagataaagttattatagtcaatggaaatgttgaaattcagttaaagaatttttagcatatacttaatgctacgggtattgcgttaaagaagtgctaatgccgtatttatcacgatttttaaacatgaattatttgaatatgtcgctaaagtgtcgttttgatgtcgcttttagcgtctttttttatgccaaaatgtaattgtaaggaggaagcgcttatgttttcagacgaagttttagagaagatttttgcaag

SEQ ID NO: 34508 - DNA, 260 bp, Unknown
  Description of Unknown: RightRegion for integrase B8509 sequence
attatagaccgtatcacaattgatgatgataatgtcaatatcaaactaaaacatctatgatttaatttacaagttttcaaatactatgtgtatagaatttataaacttgtaaactgattctttcttattcaaatatgatttatatatctacaccgatacaagatacttacaggaaatatataccagttgtggaaatcccatacagtgatataataagctcaagggagctgatacatatgaaggtaataccagaaatgcgt

SEQ ID NO: 34509 - DNA, 131 bp, Unknown
  Description of Unknown: RightRegion for integrase B8510 sequence
ataatatcaaggattgtgattgtcaatggtgatgttgaaattcaattaaagaatttttagcagaacctattgttatcggagtggcaataggatgtgctaatgccgtatttatcatacttttaaaacttcat

SEQ ID NO: 34510 - DNA, 260 bp, Unknown
  Description of Unknown: RightRegion for integrase B8511 sequence
ataattgataaagtgattgtaggcaaggatgatatagaaattcaattaaaaaacttttagcacctacataatgcagttcctatgataataggggaatgtaggagatatctgagagacaataatgcgataagggtgtcacgttccctccgcgatatagcgtacaaagcgatatacgcgaaggagaatctgcaaaagactagggataaggaacctacgatagaagagatagcggaggagataagtatacctaaggaagatat

SEQ ID NO: 34511 - DNA, 260 bp, Unknown
  Description of Unknown: RightRegion for integrase B8512 sequence
ataattgaaaaaatcgtaattagcaatggaaatattgagataaaattgaaagatttttagcactactataatgctatccaatggtatatatttactgctaatataggtatattaatttagcagtaaaatagtaccatacctacggcattgggttagtgctaatgcgcatatttactacatttttgagtcattatagtggcaattattagtcgctattaatggctctttttgttttatgataattacaaagggaggaataa

SEQ ID NO: 34512 - DNA, 260 bp, Unknown
  Description of Unknown: RightRegion for integrase B8513 sequence
ataatagataggattgttatagtcaatggaaatattgaaatacagttaaagaatttttagcagaaacttaatgccatgggcatggcatataggaagtgctaatgccgtatttatcacgttttacaattatataatttcaatgctgtcgcttatatgtcgtacatatgtctattatgtgtcgctttaagcgtctttttttatgcaaaaatgtaatcagaaagagaggtaatgtaaatgttttctgatgaagttagagaaaa

SEQ ID NO: 34513 - DNA, 260 bp, Unknown
  Description of Unknown: RightRegion for integrase B8514 sequence
ataattgacaagataatcattgtcaatggcaatattgagatacagttaaagaatttttagcacttactgtatgcggttcctatggcggtatgctagtgctaatgccgtatttatcgcgttttttcaaagaaggaaattggatatttgtcgcttttatgtcgccaagctgtcgctttaggcggctttttttatgccaaaatataagcaaaaggagggataaccgatgttgtcagataaggtaattgagaagattttcgcga

SEQ ID NO: 34514 - DNA, 260 bp, Unknown
  Description of Unknown: RightRegion for integrase B8515 sequence
ataattgataaggtgattgtaggcaaggacgatatagaaattcagctaaaaaacttttagcacttacataatgcagttcctatgattataggtgagtgcagaaggtatctcagagataacaatgctataagagtatcaaggtcattgcgtgatatagcctacaaggcgatatatgccaaggaaaatctccagaagacaaaggataaggagccgacgatagaggagatagcggaggagataagtataccgaaggaagatat

SEQ ID NO: 34515 - DNA, 260 bp, Unknown
  Description of Unknown: RightRegion for integrase B8516 sequence
attatagaccgcatcataattgatgatgataatgtcaatatcaagctaaagcaactataatctaatttacaagtttactaacaccatgtgtatgggattcggatgcaacgcagcgggcattgtgggatgccgtatcattgattcccccagagaacggcttattgccatgataaccaacaactttgtgccatgcaacggaaggtttccgccaccatacaaagggaaacaaaattgttcctcggcgctgacaatgaagaaac

SEQ ID NO: 34516 - DNA, 260 bp, Unknown
  Description of Unknown: RightRegion for integrase B8517 sequence
ataattgaaaaaatcgtaattagcaatggaaatattgagataaaattgaaagatttttagcactactataatgctatccaatggtatatatttactgctaatataggtatattaatttagcagtaaaatagtaccatacctgcggtattgggttagtgctaatgcgcatatttactacacttttgagtcattatagtggcaattattagtcgctattaatggctctttttgttttatgataattacaaagggaggaataa

SEQ ID NO: 34517 - DNA, 260 bp, Unknown
  Description of Unknown: RightRegion for integrase B8518 sequence
ataattgacaagatagtaattgtcaatggaaatattgaaatacagcttaagaatttttagcacaaacttaatgcagttcctatagcatataggaagtgctaatgccgcatttatcgcgttttacaattatataatttcagcattgccgcttatatgtcgcacatatgtctattatgtgtcgctataagtgattttttttatgcaaaaatgtaactagaaagagaggtagtgcaaatgttttctgatgaagtaagagaaaa

SEQ ID NO: 34518 - DNA, 260 bp, Unknown
  Description of Unknown: RightRegion for integrase B8519 sequence
ataatatcaaggattgtgattgtcaatggtgatgttgaaattcaattaaaaaatttttagcagaacctattgttatcggagtggcaataggatgtgctaatgccgtatttatcatacttttaaaactgcatattttttcgtttgtcgcaaaagtgtcgtatatgtgtcactatatgcgactttttttatgccaaaatttaagcataaggagggatgaccttatgggaaaattcaaattttctgatgaaacactggaacat

SEQ ID NO: 34519 - DNA, 131 bp, Unknown
  Description of Unknown: RightRegion for integrase B8520 sequence
ataatatcaaggattgtgattgtcaatggtgatgttgaaattcaattaaagaatttttagcagaacctattgttatcggagtggcaataggatgtgctaatgccgtatttatcatacttttaaaactgcat

SEQ ID NO: 34520 - DNA, 260 bp, Unknown
  Description of Unknown: RightRegion for integrase B8521 sequence
attatagaccgtatcacaattgatgatgataatgtcaatatcaaactaaaacatctatgatttaatttgcaagttttcaaatactatgtgtatagagtttataaacttgcaaattatttcttccttatttaaatgcagtatttatgatttattcgattctccatataaataatacttaggcgggcccggtcacatccggtacccgcttttatcatttctaaaatccataaatatttatcaatccctcttgaatttgcgcc

SEQ ID NO: 34521 - DNA, 260 bp, Unknown
  Description of Unknown: RightRegion for integrase B8522 sequence
ataatagacaaaattgttatagtcaatggaaatatcgaaattcaattaaaaaatttttagcacaaacttaatgccgtgcctatggcatataggaagtgctaatgccgtatttatcacgtttttacaactgcataattttaaaaatgtcgcttatgtgtcatatatgtgtctattatatgtcgctataagcgtctttttttatgtcaaaattaagatagaaagagaggtagtgcgaatgttttctgatgaagttagagaaa

SEQ ID NO: 34522 - DNA, 260 bp, Unknown
  Description of Unknown: RightRegion for integrase B8523 sequence
ataattgacaagatagtaattgtcaatggaaatattgaaatacagcttaagaatttttagcacaaacttaatgcagttccaatgattactggggagattaagaggtatcttcgtgataacagtgcaataagagtaagccgttcattaaaggatatggcttataaggcactttatacaaaagaacagctattaaagagcaggcagaaggaaccgacaatatcggagattgcaagtgagataggagcatctaaggaggatat

SEQ ID NO: 34523 - DNA, 182 bp, Unknown
  Description of Unknown: RightRegion for integrase B8524 sequence
attatagaccgtatcataattgatgatgataatgtcaatatcaaactaaaacagctataatttagtttacaagttttctaataccatgtgtatgggattcggatgcaacgcagcgggcattgtgggctgccgtatcattgattcccccagagaacggcttattgccatgataaccaacaact

SEQ ID NO: 34524 - DNA, 260 bp, Unknown
  Description of Unknown: RightRegion for integrase B8525 sequence
ataatagacaaaattgttatagtcaatggaaatattgaaattcaattaaaaaatttttagcacaaacttaatgctgtgcccatgataattggggagataagacgttttttgagggataacagccagatacgggtgtcgaggtcgcttaaagatgtggcattcagggcaatatatgccaaagaaagaattatgaaaacagggaaggatgaacccacggttaatgaacttgccacggaaataggtgtaagcaaagaagaact

SEQ ID NO: 34525 - DNA, 260 bp, Unknown
  Description of Unknown: RightRegion for integrase B8526 sequence
ataattgaaaaaatcgtaattagcaatggaaatattgagataaaattgaaagatttttagcactacaataatgctattctatggtatatatttactgctaatataggtatattgatttagcagtaaaatagtaccatacccatggcatgtggttagtgctaatgcgcatatttactacacttttgagtcactataatggcatttatttgtcacttatagtggctttttttattttatgcttattacaaagggaggaataa

SEQ ID NO: 34526 - DNA, 84 bp, Unknown
  Description of Unknown: RightRegion for integrase B8527 sequence
ataattgataaggtaattgtaggcaaggacgatatagaaattcagctaaaaaacttttagcacttacataatgcagttcctatg

SEQ ID NO: 34527 - DNA, 260 bp, Unknown
  Description of Unknown: RightRegion for integrase B8528 sequence
ataattgacaagataatcattgtcaatggcaatattgagatacagttaaagaatttttagcacttactgtatgccatgcctacggcggtatgctagtgctaatgctgtatttatcgcgttttttcaaagggaaaattgaacatttgtcgcttttatgtcgccaagctgtcgctttaggcggctttttttatgccaaaatataagcaaaaggagggataaccgatgttgtcagataaggtgattgagaagattttcgcgaa

SEQ ID NO: 34528 - DNA, 260 bp, Unknown
  Description of Unknown: RightRegion for integrase B8529 sequence
ataatatcaaggattgtgattgtcaatggtgatgttgaaattcaattaaagaatttttagcagaacctattgttatcggagtggcaataggatgtgctaatgccgtatttatcatacttttaaaactgaatatttttttgcttgtcgcaaaagtgtcgtatatgtgtcactatatgcgactttttttatgcaaaaatttaatcataaggagggatgaccttatgggaaaattcaaattttcagatgaaacactggaacat

SEQ ID NO: 34529 - DNA, 260 bp, Unknown
  Description of Unknown: RightRegion for integrase B8530 sequence
ctccgcggctttctgggcaagtggtgctttgcgcgcacgcaaaaggcggcgtctccgtgaatacggagacaccgcctgacgctgtcaaaaaagtgctctgagaattaattgttgcgttttccgtcaggagcgcctatacttgtacgtagaacgtcacgaaggaatctgacctgcggatttttcccgtatgagtcggttatgtcctttgtgacgtttccattttcattccgtcactggcaatccgcccagccggagagcac

SEQ ID NO: 34530 - DNA, 260 bp, Unknown
  Description of Unknown: RightRegion for integrase B8531 sequence
ataatatcaaggattgtgattgtcaatggtgatgttgaaattcaattaaagaatttttagcagaacctattgttatcggagtggcaataggatgtgctaatgccgtatttatcatacttttaaaactgcatattttttcgcttgtcgcaaaagtgtcgtatatgtgtcactatatgcgactttttttatgccaaaatttaatcataaggagggatgaccttatgggaaaattcaaattttctgatgaaacactggaacat

SEQ ID NO: 34531 - DNA, 260 bp, Unknown; identical to SEQ ID NO: 34513
  Description of Unknown: RightRegion for integrase B8532 sequence

SEQ ID NO: 34532 - DNA, 260 bp, Unknown
  Description of Unknown: RightRegion for integrase B8533 sequence
ataattgacaagataatcattgtcaacggaaacattgagatacagttaaaaagtttttagcacttactgtatgccatgcctatggcagtatgctagtgctaatgccgtatttatcgcgtttttttcaaaaaggaaaataaaatatttgtcgcttttatgtcgccaagttgtcactttaggtggctttttttatgccaaaatataaacaaaaggagggataacagatgttgtcggacaaagtgaaagaaaagctttttgca

SEQ ID NO: 34533 - DNA, 260 bp, Unknown
  Description of Unknown: RightRegion for integrase B8534 sequence
ataattgacaagatagtaattgtcaatggaaatattgaaatacagcttaagaatttttagcacaaacttaatgcagttcctatagcatataggaagtgctaatgccgcatttatcgcgttttacaattatataatttcagcattgtcgcttatatgtcgcacatatgtctattatgtgtcgctataagtgattttttttatgcaaaaatgtaactagaaagagaggtagtgcaaatgttttctgatgaagtaagagaaaa

SEQ ID NO: 34534 - DNA, 260 bp, Unknown
  Description of Unknown: RightRegion for integrase B8535 sequence
ataatctctaaagtagtagttgtcaacggaaacgttgacattcaattaaaatctttttagcataaccttattaccgtccgatggttggcggatatgctaagtgccatatttcctatatgtcccaaatattaatgtcataagtgtgtcggaattatgtcttttgaatgtcgctataagcgactttttttgtgcgaaaatacaaaatagataggaggtacgacctatgttttcggatgatctattaactattatattctcag

SEQ ID NO: 34535 - DNA, 260 bp, Unknown
  Description of Unknown: RightRegion for integrase B8536 sequence
attatagaccgtatcataattgatgatgataatgtcaatatcaaactaaaacagctataatttagtttacaagttttctaataccatgtgtatgggattcggatgcaacgcagcgggcatcgtgggctgccgcatcattgattctcccagggagcggctcattgccatgataaccaacaactttgtgccctgcaacggaaggtttcccaccctcatcgccattatctccatgttttttgtgggcgtatccggaggtgcct

SEQ ID NO: 34536 - DNA, 260 bp, Unknown
  Description of Unknown: RightRegion for integrase B8537 sequence
ataattgataagattgttatagtcaatggaaacatagaaatacaattgaagaatttttagcacttactatatgctgttccgatggcattaagttagtgctaataccgtgtttatcgtactttttacaattaaataaaatcaaactgtcgtttttgtgtcgttaaactgtcgtttttctgtcgctttaagcggctttttttatgtgaaaataaaattacaaaaaggagagtgattgaagtgtacgacgaagatttaagaga

SEQ ID NO: 34537 - DNA, 260 bp, Unknown
  Description of Unknown: RightRegion for integrase B8538 sequence
ataattgataaggtgattgtaggcaaggacgatatagaaattcagctaaaaaacttttagcacttacataatgcagttcctatggcattaaggtggtgctataccgcatatacactacattctttttgacacatgacgcattatgtgtcttttttattgctattttttaggctatatgttatgttgattgtgtacttaggaggtatattgatgattgatatatctaagctgataaaggctgaatatgagtacataagatt

SEQ ID NO: 34538 - DNA, 260 bp, Unknown
  Description of Unknown: RightRegion for integrase B8539 sequence
ataatatcaaggattgtgattgtcaatggtgatgttgaaattcaattaaagaatttttagcagaacctattgttatcggagtggcaataggatgtgctaatgccgtatttatcatacttttaaaactgcatatttttttgcttgtcgcaaaagtgtcgtatatgtgtcactatatgcgactttttttatgccaaaatttaagcataaggagggatgaccttatgggaaaattcaaattttcagatgaaacactggaacat

SEQ ID NO: 34539 - DNA, 260 bp, Unknown
  Description of Unknown: RightRegion for integrase B8540 sequence
ataattgataaagttattgtaggcaaggacgatatagaaattcagctaaaaaacttttagcacttacataatgcagttcctatgatcataggtgagtgcagaaggtatctcagagataacaatgctataagagtatcaaggtcattgcgtgatatagcctacaaggcgatatatgccaaggaaaatctccagaagacaaaggataaggagccgacgatagaggagatagcggaggagataagtataccaaaggaagatat

SEQ ID NO: 34540 - DNA, 260 bp, Unknown
  Description of Unknown: RightRegion for integrase B8541 sequence
ataattgataaggtgattgtaggcaaggacgatatagaaattcagctaaaaaacttttagcacttacataatgcagttcctatgatcataggtgagtgcagaaggtatctcagagataacaatgctataagagtatcaaggtcattgcgtgatatagcctacaaggcgatatatgccaaggaaaatctccagaagacaaaggataaggagccgacgatagaggagatagcggaggagataagtataccgaaggaagatat

SEQ ID NO: 34541 - DNA, 260 bp, Unknown; identical to SEQ ID NO: 34507
  Description of Unknown: RightRegion for integrase B8542 sequence

SEQ ID NO: 34542 - DNA, 80 bp, Unknown
  Description of Unknown: RightRegion for integrase B8543 sequence
ataattgacaagatagtaattgtcaatggaaatattgaaatacagcttaagaatttttagcataaacttaatgcagttcc

SEQ ID NO: 34543 - DNA, 260 bp, Unknown
  Description of Unknown: RightRegion for integrase B8544 sequence
atagtagagaaaatcgtaatagtcaatggagatgtagaaattgtattaaagaacttttagcacagacatactgcacgtccgatggcggtagtttatgctaaacgccgtatttcctgtgtttgcgaatagtggttgtcgcttatgtggcatgattttgacgctgagagcgtctttttttgtgcgaaaattcaaataaaggggtggtgatatgttttcagatgtgcttttagaaaaaatattttgtgacgaaagaatgagac

SEQ ID NO: 34544 - DNA, 260 bp, Unknown
  Description of Unknown: RightRegion for integrase B8545 sequence
ataattgacaagatagtaattgtcaatggaaatattgaaatacagcttaagaatttttagcataaacttaatgcagttcctatagcatataggaagtgctaatgccgcatttatcgcgttttacaattatataatttcagcattgtcgcttatatgtcgcacatatgtctattatgtgtcgctataagtgattttttttatgcaaaaatgtaactagaaagagaggtagtgcaaatgttttctgatgaagtaagagaaaa

SEQ ID NO: 34545 - DNA, 260 bp, Unknown
  Description of Unknown: RightRegion for integrase B8546 sequence
atagtagagaaaatcgtaatagtcaatggagatgtagaaattgtattaaagaacttttagcacagacatactgcacgtccgatggctgtagtttatgctaaacgccgtatttcctgtgtttgcgaatagtggttgtcgcttatgtggcatgattttgacgctgagagcgtctttttttatgcgaaaattcaaataaaggggtggtgatatgttttcagatgcgcttttagaaaaaatattttgtgacgaaagaatgagac

SEQ ID NO: 34546 - DNA, 260 bp, Unknown
  Description of Unknown: RightRegion for integrase B8547 sequence
ataattgacaagatagtaattgtcaatggaaatattgaaatacagcttaagaatttttagcataaacttaatgcagttcctatagcatataggaagtgctaatgccgcatttatcacgttttacaattatataatttcagcattgtcgcttatatgtcgcacatatgtctattatgtgtcgctataagtgattttttttatgcaaaaatgtaactagaaagagaggtaatgcgaatgttttctgatgaagttagagaaaa

SEQ ID NO: 34547 - DNA, 260 bp, Unknown
  Description of Unknown: RightRegion for integrase B8548 sequence
ataattgataaagtgattgtaggcaaggacgatatagaaattcagttaaaaaacttttagcacctacataatacagttcctatgatcataggtgagtgcagaaggtatctcagagataacaatgctataagagtatcaaggtcattgcgtgatatagcctacaaggcgatatatgccaaggaaaatctccagaagacaaaggataaggagccgacgatagaggagatagcggaggagataagtataccgaaggaagatat

SEQ ID NO: 34548 - DNA, 260 bp, Unknown
  Description of Unknown: RightRegion for integrase B8549 sequence
ataatagacaaaattgttatagtcaatggaaatatcgaaattcaattaaaaaatttttagcacaaacttaatgctgcgcctatggcatataggaagtgctaatgccgtatttatcacgtttttacaactgcataattttaaaaatgtcgcttatgtgtcatatatgtgtctattatatgtcgctataagcgtctttttttatgccaaaattaagttagaaagagaggtagtgcgaatgttttctgatgaagttagagaaa

SEQ ID NO: 34549 - DNA, 260 bp, Unknown
  Description of Unknown: RightRegion for integrase B8550 sequence
ataattgacaagataatcattgtcaacggaaatattgaaatacagttaaaaagtttttagcacttactgtatgccgtgcctatggcagcatgctagtgctaatgccgtatttatcgcgtttttcaaaaaggaaaataaaatatttgtcgcttttatgtcgccgagctgtcgctttgagcgactttttttatgtcaaaatataaacaaaaggagggatagcagatgctgtcggacaaagtgaaagaaaagctttttgcaaa

SEQ ID NO: 34550 - DNA, 260 bp, Unknown
  Description of Unknown: RightRegion for integrase B8551 sequence
ataatcaaaaaaatagtaattgtcaatggaaacattgaaattcagctgaaaaatttttagcacttactgcacgcagttcctatgacatatagtaggtgctaatgccgtatttatcacgttttttagtcaactataaaactgaatttaatcaaataatttatcaaataatggtttatctttgactttttcgcaaaaatgtgtataataatctatggaaagtgaggtaagtttatgaaacatataactggcagaagttatcc

SEQ ID NO: 34551 - DNA, 260 bp, Unknown
  Description of Unknown: RightRegion for integrase B8552 sequence
ataattgacaagataatcattgtcaacggaaatattgagatacaattaaagaatttttagcacttactgtatgcggtgccgatgatagccggcgagataaaaagatttttaagggatgacggaatgctcaaggtcagccgttcgctcaaggaaaatggatacaggataaagaaggcgtccgatgagctggtatcacagaacggaagggaggcaacgatagaggagcttgcggcagccacggagctgtcggttgaggatgt

SEQ ID NO: 34552 - DNA, 109 bp, Unknown
  Description of Unknown: RightRegion for integrase B8553 sequence
ataaaagaaatcttaattgaccctgagactcacgagctgaatggcataatatttttttagtttgttggtgtatcaaacatactaactcaaccgtgtaatcagcctctcc

SEQ ID NO: 34553 - DNA, 260 bp, Unknown
  Description of Unknown: RightRegion for integrase B8554 sequence
ataatagataaagttattatagtcaatggaaatgttgaaattcagttaaagaatttttagcatatacttaatgctacgggaacggcgtaggttgagaattgtacgccctgtgaaatatcaaaattatcaattgctttaatcatgccgacacagccaatctggaataaatcgtcaatattttcactgctttgtgaaaaacgctgaacaatgcttaaaacaaggcgcagatttccgttaataaaacgctcgcgtgcctgtgt

SEQ ID NO: 34554 - DNA, 260 bp, Unknown; identical to SEQ ID NO: 34535
  Description of Unknown: RightRegion for integrase B8555 sequence

SEQ ID NO: 34555 - DNA, 260 bp, Unknown
  Description of Unknown: RightRegion for integrase B8556 sequence
ataattgacaagatagtaattgtcaatggaaatattgaaatacagcttaagaatttttagcataaacttaatgcagttcctatagcatataggaagtgctaatgccgcatttatcacgttttacaattatataatttcagcattgtcgcttatatgtcgcacatatgtctattatgtgtcgctataagtgattttttttatgcaaaaatgtaattagaaagagaggtaatgcgaatgttttctgatgaagttagagaaaa

SEQ ID NO: 34556 - DNA, 260 bp, Unknown; identical to SEQ ID NO: 34533
  Description of Unknown: RightRegion for integrase B8557 sequence

SEQ ID NO: 34557 - DNA, 260 bp, Unknown
  Description of Unknown: RightRegion for integrase B8558 sequence
atagtagagaaaatcgtaatagtcaatggagatgtagaaattgtattaaagaacttttagcacagacatactgcacgtccgatgatcgttggagaaatccgtcgttatatgcgggataacaattccatccgtgttagcagatccctgcgagatacagcgtacaaagcgatttacgcaagggaaaattatatgaaacagtatcagaaagagccgaccgtgcaggaaattgcaaaagaagtaggcatatcgaaagaagatat

SEQ ID NO: 34558 - DNA, 260 bp, Unknown
  Description of Unknown: RightRegion for integrase B8559 sequence
ataattgacaagatagtaattgtcaatggaaatattgaaatacagcttaagaatttttagcataaacttaatgcagttccaatgattataggagagataaaaaggtacctgcgcgacaacagtgcaataagggtcagcagaagccttaaggatatggcatataaagccatatacacaaaggagcagctattaaagaagaagcagaaggagccgactatatcagagatagcaggtgagataggcgtatcaaaagaagagat

SEQ ID NO: 34559 - DNA, 260 bp, Unknown
  Description of Unknown: RightRegion for integrase B8560 sequence
ataatagataggattattatagtcaatggaaatattgaaatacagttaaagaatttttagcagaaacttaatgccattggcatggcatataggaagtgctaatgccgtatttatcacgttttacaattatataatttcaatgctgtcgcttatatgtcgtacacatgtctattatgtgtcgctttaagcgtctttttttatgcaaaaatgtaatcagaaagagaggtaatgcaaatgttttctgatgaagttagagaaaa

SEQ ID NO: 34560 - DNA, 260 bp, Unknown
  Description of Unknown: RightRegion for integrase B8561 sequence
ataatagataggattgttatagtcaatggaaatattgaaatacagttaaagaatttttagcagaaacttaatgccattggaactgcataagttgaaaactgtacaccctgtcctaagtcgaaattatctatggcttttattaatccaatacatccaatctggaataagtcatccatattttcgttactgttagagaatcttccaacaatgcttaggacaagtcgaagattacctttgatgaaagcttcacgtgcgctgtt

SEQ ID NO: 34561 - DNA, 260 bp, Unknown
  Description of Unknown: RightRegion for integrase B8562 sequence
ataattgataaggtgattgtaggcaaggacgatatagaaattcagctaaaaaacttttagcacttacataatgcagttcctatggcattaaggtggtgctataccgcatatacactacattctttttgacacatgacgcataatgcgtcttttttattgctattttttaggctgtatgttatgttgattgtgtacttaggaggtatattgatgattgatatatctaagctgataaaggctgaatatgagtacataagatt

SEQ ID NO: 34562 - DNA, 260 bp, Unknown
  Description of Unknown: RightRegion for integrase B8563 sequence
ataatagacaaaattgttatagtcaatggaaatatcgaaattcaattaaaaaatttttagcacaaacttaatgccgtgcctatggcatataggaagtgctaatgccgtatttatcacgtttttacaattacataattttaaaaatgtcgcttatgtgtcatatatgtgtctattatatgtcgctgtaagcgtctttttttatgtaaaaatataatcagaaagagaggtaatgagaatgttttctgatgaagtcagagaga

SEQ ID NO: 34563 - DNA, 124 bp, Unknown
  Description of Unknown: RightRegion for integrase B8564 sequence
gtaaaagaaatcatcgcatacccagacggtacgttttcatttgtgttgcgtaatatataatatgtgttgcctggtggtaatgcatgttatatattacagttgatttccatggcatgagtttttg

SEQ ID NO: 34564 - DNA, 260 bp, Unknown
  Description of Unknown: RightRegion for integrase B8565 sequence
ataatagaaaaagtagttattgtcaatggtgatattgaaatacagttaaaaacgttttagcgtcaaaaatagccgtaggtacggcatataggaagtgctaatgccgtatttatcatacataattttatcaaaaaaatccatgtcgcacaatagtctttataatgtcgcttttagcgactttttttgtgcaataattcatatataggagaaaaatcatgattatgaattttagcccatttgaatttgaaatattgaacgag

SEQ ID NO: 34565 - DNA, 260 bp, Unknown
  Description of Unknown: RightRegion for integrase B8566 sequence
ataatagataagattgttatagtcaatggaaatattgaaatacaattaaagaatttttagcagaaacttaatgccattggcatggcatataggaagtgctaatgccgtatttatcacgttttgcaattatataattttaatgttgtcgcttatatgtcgtacatatgtctatcacatgtcgctataagcgtctttttttatgccaaaatataatcagaaagagaggtaatgcgaatgttttctgatgaagttagagaaaa

SEQ ID NO: 34566 - DNA, 260 bp, Unknown
  Description of Unknown: RightRegion for integrase B8567 sequence
ataatatcaaggattgtgattgtcaatggtgatgttgaaattcaattaaagaatttttagcagaacctattgttatcggaaccgcgtaggtggaaaattttacacccagcgtggaatcaaaattgtcgatggccttgatcagaccgatacagccgatctggaacagatcgtccacattttccgcactgccggaaaagcgtttgatcacgctcaggaccagacgcaggttgccttcgatgtaggtctctctggcggcggta

SEQ ID NO: 34567 - DNA, 260 bp, Unknown
  Description of Unknown: RightRegion for integrase B8568 sequence
ataattgataaagtgattgtaggcaaggatgatatagaaattcagttaaagaacttttagcacctacataatgcagttcctatggcgttaaggtggtgctataccgcatatacactacattctttttgacacatgacgcataatgcgtctttttttattgccatttttaaaactgtgtgatatgttgagtgtgtacttaggaggtatattgatgattgatatatctaagctgataaaggctgaatatgagtacataagat

SEQ ID NO: 34568 - DNA, 128 bp, Unknown
  Description of Unknown: RightRegion for integrase B8569 sequence
ataattgacaagatagtaattgtcaatggaaatattgaaatacagcttaagaatttttagcacaaacttaatgcggttcctatagcatataggaagtgctaatgccgcatttatcgcgttttacaatt

SEQ ID NO: 34569 - DNA, 260 bp, Unknown; identical to SEQ ID NO: 34540
  Description of Unknown: RightRegion for integrase B8570 sequence

SEQ ID NO: 34570 - DNA, 260 bp, Unknown
  Description of Unknown: RightRegion for integrase B8571 sequence
ataatatcaaggattgtgattgtcaatggtgatgttgaaattcaattaaagaatttttagcagaacctattgttatcggagtggcaataggatgtgctaatgccgtatttatcatacttttaaaactgcatatttttttgcttgtcgcaaaagtgtcgtatatgtgtcactatatgcgactttttttatgccaaaatttaagcataaggagggatgaccttatgggaaaattcaaattttctgatgaaacactggaacat

SEQ ID NO: 34571 - DNA, 260 bp, Unknown
  Description of Unknown: RightRegion for integrase B8572 sequence
ataatagataaaatcgtaatagtcaatggaaatatcgaaattcagttaaaaaaattttagcataaacataatgccatgcctacggtattaagttagtgctaacgccgtatttatcactatttcaaaatacttaattttatagtatgtcgctaaaaagtcatttttttgtcgtttttggcgtctttttttatgcaaaaatttaatcaaaggagggaacggcagatgattacagacgcaatgcgagaacgtatttttggcaa

SEQ ID NO: 34572 - DNA, 260 bp, Unknown
  Description of Unknown: RightRegion for integrase B8573 sequence
ataatatcaaggattgtgattgtcaatggtgatgttgaaattcaattaaagaatttttagcagaacctattgttatcggcacagcataagtggaaaattttacaccaagtgtggagtcaaagttgtcaatggctttgatcagcccgatgcagccgatctggaacagatcatccacgttctccgcactgctcgaaaaacgtttgatcacacttaggaccagacgtaaatttccctcaatatagctctcgcgggcagcggta

SEQ ID NO: 34573 - DNA, 139 bp, Unknown
  Description of Unknown: RightRegion for integrase B8574 sequence
ataattgaaaaaatcgtaattagcaatggaaatattgagataaaattgaaagatttttagcactacaataatgctattctatggtatatatttactgctaatataggtatatttatttagcagtaaaatagtaccatac

SEQ ID NO: 34574 - DNA, 260 bp, Unknown
  Description of Unknown: RightRegion for integrase B8575 sequence
ataatagataaaatcgtaatagtcaatggaaatatcgaaattcagttaaaaaaattttagcataaacataatgccatgcccatgatcatgggggagataaagcggtttatgcgggatgacggaatgataaagatcagtcgtaccatgaaagagaacggatggaaaatcaaagtggcagcgcagcggctggggcaggagcttggacggcaggcgacggttgatgagattgcggctgcaaccgagctggcaccggaggagat

SEQ ID NO: 34575 - DNA, 260 bp, Unknown
  Description of Unknown: RightRegion for integrase B8576 sequence
attatagaccgtatcataattgatgatgataatgtcaatatcaaactaaaacagctataatttagtttacaagttttctaataccatgtgtatagagtttataaacttgcaaattatttcttccttatttaaatgcagtatttatgatttattcgattctccatataaataatacttaggcgggcccggtcacatccggtacccgcttttattaccactaaattctcaaaaaattatatcaattcctcttgacattacgc

SEQ ID NO: 34576 - DNA, 260 bp, Unknown
  Description of Unknown: RightRegion for integrase B8577 sequence
ataatatcaaggattgtgattgtcaatggtgatgttgaaattcaattaaagaatttttagcagaacctattgttatcggaatggcaataggatgtgctaatgccgtatttatcatacttttaaaactgcatattttttgtttgtcgcaaaagtgtcgtatatgtgtcactatatgcgactttttttatgccaaaatttaagcataaggaggaatgaccttatggcaaaattcagattttcagatgaagcactggaacata

SEQ ID NO: 34577 - DNA, 260 bp, Unknown
  Description of Unknown: RightRegion for integrase B8578 sequence
attataaaagagattaggcaactcggagaacccgaccattacgccattatttttttatagttattttttgtactaactgtatatcgccagttggtgctatatagttagtacaaaccataaaagcagggtttcccctgcttttatatctttttttccttttttaatttatattctattaactctaataaatactcattcggtacatatcttcccgctttccagtcttgtactgttctatacggtatattaaaatactcgct

SEQ ID NO: 34578 - DNA, 260 bp, Unknown
  Description of Unknown: RightRegion for integrase B8579 sequence
ataattgataaggtgattgtcgccaaggacgatatagaaattcagttaaaaaacttttagcacctacataatacagttcctatggcgttaaggtggtgctataccgcatatacactacattctttttgacacatgacgcataatgcgtctttttttattgccatttttaaagctatgtgatatgttgagtgtgtacttaggaggtatattgatgattgatatatctaagctgataaaggctgaatatgagtacataagat

SEQ ID NO: 34579 - DNA, 260 bp, Unknown
  Description of Unknown: RightRegion for integrase B8580 sequence
ataattgacaagataatcattgtcaacggaaatattgagatacaattaaagaatttttagcacttcctgtctgccatccctacggcggtatgctagtgctaatgccgtatttatcgcgttttttcaaagtggaaattgaatatttgtcgcttttatgtcgccaagctgtcgctttaggcggctttttttatgccaaaatataagcaaaaggagggataaccgatgttgtcagataaggtgattgagaagattttcgcgaa

SEQ ID NO: 34580 - DNA, 260 bp, Unknown
  Description of Unknown: RightRegion for integrase B8581 sequence
ataaaagaaatcttaattgaccctgagactcacgagctgaatggcataatatttttttagtttgttggtgtatcaaacatactaactcaaccgtgtaatcagcctctcccgagacaaatgctcctgacgtattggcgaaatcaatgttttgtacaaggttaatgtctttttgtggattcattccatgtttctttaaaacgtattcaaataccatttctggcataccacctggtcttccaccaatgacttttttacccttt

SEQ ID NO: 34581 - DNA, 260 bp, Unknown
  Description of Unknown: RightRegion for integrase B8582 sequence
tttgatacaaagcgtatcttaattgcggttcattttttatctctaaaaaacggcttgtaattagtatttacggcatttttgccgattagtaaagtgtcagagtgaaaaaaatacggctgttttgtaataaaaaaggcaaccgtttagtgtgtttttagagccgattttttattctgacacaaaactttttgaccgtttcatttttaaaaataagcgtttcatttttcaaaatcagaatttataacggatgtcctgttttt

SEQ ID NO: 34582 - DNA, 260 bp, Unknown
  Description of Unknown: RightRegion for integrase B8583 sequence
ataattgacaagatagtaattgtcaatggaattattgaaatacagcttaagaatttttagcataaacttaatgcagttcctataacatataggaagtgctaatgccgcatttatcacgttttacaattatataatttcagcattgtcgcttatatgtcgcacatatgtctattatgtgtcgctataagtgattttttttatgcaaaaatgtaactagaaagagaggtaatgcgaatgttttctgatgaagttagagaaaa

SEQ ID NO: 34583 - DNA, 260 bp, Unknown
  Description of Unknown: RightRegion for integrase B8584 sequence
ataattgataaagttattgtaggcaaggacgatatagaaattcagctaaaaaacttttagcacttacataatgcagttcctatgatcataggtgagtgtagaaggtatctcagagataacaatgctataagagtatcaaggtcattgcgtgatatagcctacaaggcgatatatgccaaggaaaatctccagaagacaaaggataaggagccgacgatagaggagatagcggaggagataagtataccgaaggaagatat

SEQ ID NO: 34584 - DNA, 260 bp, Unknown; identical to SEQ ID NO: 34540
  Description of Unknown: RightRegion for integrase B8585 sequence

SEQ ID NO: 34585 - DNA, 260 bp, Unknown
  Description of Unknown: RightRegion for integrase B8586 sequence
ataattgataaagtgattgtaggcaaggacgatatagaaattcagctaaaaaacttttagcacctacataatgcagttcctatgatcataggtgagtgcagaaggtatctcagagataacaatgctataagagtatcaaggtcattgcgtgatatagcctacaaggcgatatatgccaaggaaaatctccagaagacaaaggataaggagccgacgatagaggagatagcggaggagataagtataccgaaggaagatat

SEQ ID NO: 34586 - DNA, 260 bp, Unknown; identical to SEQ ID NO: 34566
  Description of Unknown: RightRegion for integrase B8587 sequence

SEQ ID NO: 34587 - DNA, 260 bp, Unknown
  Description of Unknown: RightRegion for integrase B8588 sequence
ataatatcaaggattgtgattgtcaatggtgatgttgaaattcaattaaagaatttttagcagaacctattgttatcggagtggcaataggatgtgctaatgccgtatttatcatacttttaaaactgaatatttttttgcttgtcgcaaaagtgtcgtatatgtgtcactatatgcgactttttttatgccaaaatttaagcataaggagggatgaccttatgggaaaattcaaattttcagatgaaacactggaacat

SEQ ID NO: 34588 - DNA, 260 bp, Unknown; identical to SEQ ID NO: 34507
  Description of Unknown: RightRegion for integrase B8589 sequence

SEQ ID NO: 34589 - DNA, 260 bp, Unknown
  Description of Unknown: RightRegion for integrase B8590 sequence
ataatatcaaggattgtgattgtcaatggtgatgttgaaattcaattaaagaatttttagcagaacctattgttattggagtggcaataggatgtgctaatgccgtatttatcatacttttaaaactgaatatttttttgcttgtcgcaaaagtgtcgtatatgtgtcactatatgcgactttttttatgcaaaaatttaatcataaggagggatgaccttatgggaaaattcaaattttcagatgaaacactggaacat

SEQ ID NO: 34590 - DNA, 260 bp, Unknown
  Description of Unknown: RightRegion for integrase B8591 sequence
ataattgacaaggtaatcattgtcaacggaaatattgagatacagttaaagaatttttagcacttcctgtctgccatccctacggcggtatgctagtgctaatgccgtatttatcgcgttttttcaaagtggaaattgaatatttgtcgcttttatgtcgccaagctgtcgctttaggcggctttttttatgccaaaatataagcaaaaggagggataaccgatgttgtcagataaggtgattgagaagattttcgcaaa

SEQ ID NO: 34591 - DNA, 260 bp, Unknown; identical to SEQ ID NO: 34566
  Description of Unknown: RightRegion for integrase B8592 sequence

SEQ ID NO: 34592 - DNA, 260 bp, Unknown
  Description of Unknown: RightRegion for integrase B8593 sequence
ataatatcaaggattgtgattgtcaatggtgatgttgaaattcaattaaagaatttttagcagaacctattgttatcggagtggcaataggatgtgctaatgccgtatttatcatacttttaaaactgcatattttttgtttgtcgcaaaagtgtcgtatatgtgtcactatatgcgactttttttatgccaaaatttaatcataaggagggatgaccttatgggaaaattcaaattttcagatgaagcactggaacgta

SEQ ID NO: 34593 - DNA, 260 bp, Unknown
  Description of Unknown: RightRegion for integrase B8594 sequence
ataattgataaggtgattgtaggcaaggacgatatagaaattcagctaaaaaacttttagcacttacataatgcagttcctatggcgttaaggtggtgctataccacatatacactacattctttttgacacatgacgcacaatgcgtctttttttattgccatttttaaagctgtgtgatatgttaagtatgtacttaggaggtatattgatgattgatatatctaagctgataaaggctgaatatgagtacataagat

SEQ ID NO: 34594 - DNA, 260 bp, Unknown; identical to SEQ ID NO: 34543
  Description of Unknown: RightRegion for integrase B8595 sequence

SEQ ID NO: 34595 - DNA, 260 bp, Unknown
  Description of Unknown: RightRegion for integrase B8596 sequence
ttatcgatcatcgatcatgtggtggttaaccgagaaacttttgaaatcacttttttgtaaaaagaaaaggtgctcactcagagcaccttttttaattcatccaacattttgttatatacctcgagtctgaaaccaattagctcgtctttatgtttacttgcgatcatgtcctccggtaaatacttctcttcgtcctcagctgattcataaattgtaagatactcaggggcctcagaactgacgaccccatatgttatctc

SEQ ID NO: 34596 - DNA, 260 bp, Unknown
  Description of Unknown: RightRegion for integrase B8597 sequence
ataattgataaggtgattgtaggcaaggacgatatagaaattcagctaaaaaacttttagcacttacataatgcagttcctatggcgttaaggtggtgctataccgcatatacactacattctttttggcacatgacgcataatgcgtctttttttattgccatttttaaagctatgtgatatgttgagagtgtacttaggaggtatattgatgattgatatatctaagctgataaaggctgaatatgagtacataagat

SEQ ID NO: 34597 - DNA, 260 bp, Unknown
  Description of Unknown: RightRegion for integrase B8598 sequence
ataattgataaggtaattgtaggcaaggacgatatagaaattcagttaaagaacttttagcacctacataatgcagttcctatggcattaaggtggtgctataccgcatatacactacattctttttgacacatgacgcataatgcgtcttttttattgctattttttaggctgtatgttatgttgattgtgtacttaggaggtatattgatgattgatatatctaagctgataaaggctgaatatgagtacataagatt

SEQ ID NO: 34598 - DNA, 260 bp, Unknown; identical to SEQ ID NO: 34538
  Description of Unknown: RightRegion for integrase B8599 sequence

SEQ ID NO: 34599 - DNA, 260 bp, Unknown
  Description of Unknown: RightRegion for integrase B8600 sequence
ataattgataaggtgattgtaggcaaggacgatatagaaattcagctaaaaaacttttagcatgtacttaatgcagttcctatggcgttaaggtggtgctataccgcatatacactacattctttttaacacatgacgcattatgcgtcttttttattgctattttttaggctatatgttatgttgattgtgtacttaggaggtatattgatgattgatatatctaagctgataaaggctgaatatgagtacataagatt

SEQ ID NO: 34600 - DNA, 260 bp, Unknown
  Description of Unknown: RightRegion for integrase B8601 sequence
ataatctctaaagtagtagttgtcaacggaaacgttgacattcagttaaaatctttttagcataagcctataaccgtccgatggttggcggatatgctaagtgccatatttcctatatgtcccaaatattaatgttataagtgtgtcggaattatgtcttttgaatgtcgctataagcgactttttttgtgcgaaaatacaaaatagataggaggtacgacctatgttttcagatgatctattaactattatattctcag

SEQ ID NO: 34601 - DNA, 260 bp, Unknown
  Description of Unknown: RightRegion for integrase B8602 sequence
ataatcgacaaagttgtgattgtcaacggagatgttgagatccagctacaacggttttgatattaaataaggaaacaactagcacaaactatatgcggtacctatgatatatagtttgtgctagataccacatataacgctatatatggaggtgctggcatgcggacgagggaaaaaaagctgtcggactacggcgtaccaaacgccctgtacagagagataaaagagcggtgttacaacagtacagacgaggatcgaga

SEQ ID NO: 34602 - DNA, 130 bp, Unknown
  Description of Unknown: RightRegion for integrase B8603 sequence
ataatagataaaatcgtaatagtcaatggaaatatcgaaattcagttaaaaaaattttagcataaacataatgccatgcctacggcattaagttagtgctaacgccgtatttatcactatttcaaaatac

SEQ ID NO: 34603 - DNA, 260 bp, Unknown
  Description of Unknown: RightRegion for integrase B8604 sequence
ataattgacaaaattgtaatagtcaatggaaatatcgaaattcagttaaagaatttttagcacttactgtatgccgtgcctatgatagccggcgaaataaagcgttttttgagggatgacggaatgcttaaggtgagccgttcgattaaggagaacggctacaggataaagagggcttcggacgagcttgtgtctaagaacggaagggaggcaactgttgaggagcttgcggcggcgacggagctgtcagtcgaggatgt

SEQ ID NO: 34604 - DNA, 260 bp, Unknown
  Description of Unknown: RightRegion for integrase B8605 sequence
ataattgataaagtgattgtaggcaaggacgatatagaaattcagctaaaaaacttttagcacctacataatgcagttcctatggcgttaaggtggcgctataccgcatatacactacattctttttgacacatgacgcattatgcgtcttttttattgctattttttaggctatatgttatgttgattgtgtacttaggaggtatattgatgattgatatatctaagctgataaaggctgaatatgagtacataagatt

SEQ ID NO: 34605 - DNA, 260 bp, Unknown
  Description of Unknown: RightRegion for integrase B8606 sequence
ataattgataaagtgattgtaggcaaggacgatatagaaattcagttaaaaaacttttagcacctacataatacagttcctatgataataggggaatgtaggagatatctgagagacaacaatgcgataagggtgtcacgttccctccgcgatatagcgtacaaagcgatatatgcgaaggagaatctgcaaaagactagggataaggaacctacgatagaagagatagcggaggagataagtatacctaaggaagatat

SEQ ID NO: 34606 - DNA, 260 bp, Unknown
  Description of Unknown: RightRegion for integrase B8607 sequence
ataattgaaaaaatcgtaattagcaatggaaatattgagataaaattgaaagatttttagcactacaataatgctatcctatggtatatatttactgctaatataggtatattaatttagcagtaaaatagtaccatacctgcggtattgggttagtgctaatgcgcatatttactacacttttgagtcattatagtggcaattattagtcgctattaatggctctttttgttttatgataattacaaagggaggaataa

SEQ ID NO: 34607 - DNA, 260 bp, Unknown
  Description of Unknown: RightRegion for integrase B8608 sequence
attatagaccgtatcataattgatgatgataatgtcaatatcaaactaaaacagctataatttagtttacaagctttctaataccatgtgtatgggattcggatgcaacgcagcgggcatcgtgggctgccgcatcattgattctcccagggagcggctcattgccatgataaccaacaactttgtgccctgcaacggaaggtttcccaccctaatcgccattatctccatgttttttgtgggcgtatccggaggtgcct

SEQ ID NO: 34608 - DNA, 260 bp, Unknown
  Description of Unknown: RightRegion for integrase B8609 sequence
ataattgataagattgttatagtcaatggagatattgaaatacagttaaagaatttttagcacttactatacgctgtgccaatggcattaagttagtgctaatgccgtgcttatcgtactttttacaattaaataaaatcaaactgtcgtttttgtgtcgttaaactgtcgtttttctgtcgctttaagcggctttttttatgtgaaaataaaattacaaaaaggagagtgattgaaatgtacgacgaagatttaagaga

SEQ ID NO: 34609 - DNA, 260 bp, Unknown
  Description of Unknown: RightRegion for integrase B8610 sequence
ataatatcaaggattgtgattgtcaatggtgatgttgaaattcaattaaagaatttttagcagaacctattgttatcggaatggcaataggatgtgctaatgccgtatttatcataattttaaaactgcatatttttttgtttgtcgcaaaagtgtcgtatatgtgtcgctatatgcgactttttttatgccaaaatttaagcataaggaggaatgaccttatggcaaaattcagattttcagatgaagcactggaacgt

SEQ ID NO: 34610 - DNA, 79 bp, Unknown
  Description of Unknown: RightRegion for integrase B8611 sequence
ataatagacaaaattgttatagtcaatggaaatatcgaaattcaattaaaaaatttttagcacaaacttaatgccgtgc

SEQ ID NO: 34611 - DNA, 260 bp, Unknown
  Description of Unknown: RightRegion for integrase B8612 sequence
ataatatcaaggattgtgattgtcaatggtgatgttgaaattcaattaaagaatttttagcagaacctattgttatcggaaccgcataggtagagaacttcacacccagagtagcgtcgaaattgtcaatggctttgatcagcccgatgcagccaatctggaacaggtcatccacgttctccgaactgcttgaaaaacgtttgatcacacttaggaccagacgtaaattcccttcgatataggtctctcgggcagcggta

SEQ ID NO: 34612 - DNA, 260 bp, Unknown
  Description of Unknown: RightRegion for integrase B8613 sequence
ataatagataggattgttatagtcaatggaaatattgaaatacaattaaagaatttttagcagaaacttaatgccatgggcatggcatataggaagtgctaatgccgtatttatcacattttaataattgcataattttaatattgtcgcttatatgtcgtacacatgtctattatgtgtcgctataagcgtctttttttatgtcaaaattaagttagaaagagaggtagtgtgaatgttttctgatgaagttagagaaa

SEQ ID NO: 34613 - DNA, 127 bp, Unknown
  Description of Unknown: RightRegion for integrase B8614 sequence
ataatagacaaaattgttatagtcaatggaaatatcgaaatccaattaaaaaatttttagcacaaacttaatgctgtgcccatgataattggggagataagacgttttttgagggataacagccaga

SEQ ID NO: 34614 - DNA, 260 bp, Unknown; identical to SEQ ID NO: 34543
  Description of Unknown: RightRegion for integrase B8615 sequence

SEQ ID NO: 34615 - DNA, 260 bp, Unknown
  Description of Unknown: RightRegion for integrase B8616 sequence
ataaaagaaatcttaattgaccctgagactcacgagctgaatggcataatatttttttagtttgttggtgtatcaaacatactaactcaaccgtgtaatcagcctctcccgagacaaatgctcctgacgtattggcaaaatcaatgttttgtacaaggttaatgtctttttgtggattcattccatgtttctttaaaacgtattcaaataccatttctggcataccacctggtcttccaccaatgacttttttccccttt

SEQ ID NO: 34616 - DNA, 260 bp, Unknown
  Description of Unknown: RightRegion for integrase B8617 sequence
ataattgacaagatagtaattgtcaatggaaatattgaaatacagcttaagaatttttagcataaacttaatgcagttcctatgattacgggtgagattaaaagatttcttagagatgacggcataataaagataagccggagtattaaggaaaatggatacaaatgttttatggcttcccagaagttaaagggtattcttaaccgcgagccgactattgaggagctgtccagggaaacaggaatagcgacagaggatat

SEQ ID NO: 34617 - DNA, 260 bp, Unknown
  Description of Unknown: RightRegion for integrase B8618 sequence
ataatagacaaaattgttatagtcaatggaaatatcgaaattcaattaaaaaatttttagcacaaacttaatgccgtgcctatggcatataggaagtgctaatgccgtatttatcacgttttaacaactgcataattttaaaaatgtcgcttatgtgtcatatatgtgtctattatatgtcgctataagcgtctttttttatgccaaaattaagttagaaagagaggtagtgcgaatgttttctgatgaagttagagaaa

SEQ ID NO: 34618 - DNA, 260 bp, Unknown
  Description of Unknown: RightRegion for integrase B8619 sequence
ataatcgaaaaaataatagttagcaatggaaatattgaaataagattgaaagatttttagcacatacataatgctatccaatggaatattgttactgctaatataggaaacttttattatcagtaacgtaacgccatacctacggcattgtgttagtgctaatgcgcatatttactacacttttgagtcattatagtggcaattattagtcgctattaatggctctttttgttttatgataattacaaagggaggaataa

SEQ ID NO: 34619 - DNA, 260 bp, Unknown
  Description of Unknown: RightRegion for integrase B8620 sequence
ataatagataggattgttatagtcaatggaaatattgaaatacagttaaagaatttttagcagaaacttaatgccatgggcatggcatataggaagtgctaatgccgtatttatcacgttttacaattatataatttcaatgctgtcgcttatatgtcgtacacatgtctattatgtgtcgctttaagcgtctttttttatgcaaaaatgtaatcagaaagagaggtaatgcgaatgttttctgatgaagttagagaaaa

SEQ ID NO: 34620 - DNA, 260 bp, Unknown
  Description of Unknown: RightRegion for integrase B8621 sequence
ataattgaaaaaatcgtaattagcaatggaaatattgaaataagattgaaagatttttagcacatacataatgctatccaatggaatattgttactgctaatataggaaacttttattatcagtaacgtaacgccatacctatggtatttggttagtgctaatgcgcatatttactacacttttgagtcattatagtggcaattattagtcgctattaatggctctttttgttttatgataattacaaagggaggaataa

SEQ ID NO: 34621 - DNA, 260 bp, Unknown
  Description of Unknown: RightRegion for integrase B8622 sequence
ccggagcagccgcaggcgcggcaatcggtagcattattcctggtcttggtactgcggtaggtgccttggtaggcgcaggagttggaggcattgcaggttggataaagggaaacaaggtcaagaaagagtatcaggacaatgtggaggagatgcagaaagaagctgaaaaagctcaaaaggtattcgatgccactggattatcaatcgacaaagtaagatttgcgaatgatgatttgaacgatgcaatgaatgacagttcc

SEQ ID NO: 34622 - DNA, 260 bp, Unknown
  Description of Unknown: RightRegion for integrase B8623 sequence
ataattgacaagataatcattgtcaacggaaatattgagatacaattaaagaatttttagcacttactgtatgccatccctacggcggtatgctagtgctaatgccgtatttatcgcgttttttcaaagtggaaattgaatatttgtcgcttttatgtcgccaagctgtcgctttaggcggctttttttatgccaaaatataagcaaaaggaggggtaaccgatgttgtcagacaaagtaattgagaagattttcgcgaa

SEQ ID NO: 34623 - DNA, 127 bp, Unknown
  Description of Unknown: RightRegion for integrase B8624 sequence
ataatagacaaaattgttatagtcaatggaaatatcgaaattcaattaaaaaatttttagcacaaacttaatgctgtgcccatgataattggggagataagacgttttttgagggataacagccaga

SEQ ID NO: 34624 - DNA, 109 bp, Unknown; identical to SEQ ID NO: 34552
  Description of Unknown: RightRegion for integrase B8625 sequence

SEQ ID NO: 34625 - DNA, 260 bp, Unknown
  Description of Unknown: RightRegion for integrase B8626 sequence
ataattgataaagtgattgtaggcaaggacgatatagaaattcagctaaaaaacttttagcacttacataatgcagttcctatgatcataggtgagtgtagaaggtatctcagagataacaatgctataagagtatcaaggtcattgcgtgatatagcctacaaggcgatatatgccaaggaaaatctccagaagacaaaggataaggagccgacgatagaggagatagcggaggagataagtataccgaaggaagatat

SEQ ID NO: 34626 - DNA, 260 bp, Unknown
  Description of Unknown: RightRegion for integrase B8627 sequence
ataatatcaaggattgtgattgtcaatggtgatgttgaaattcaattaaagaatttttagcagaacctattgttatcggagtggcaataggatgtgctaatgccgtatttatcatacttttaaaactgcatattttttgtttgtcgcaaaagtgtcgtatatgtgtcactatatgcgactttttttatgccaaaatttaatcataaggaggaatgaccttatgggaaaattcaaattttcagatgaagcactggaacgta

SEQ ID NO: 34627 - DNA, 260 bp, Unknown
  Description of Unknown: RightRegion for integrase B8628 sequence
ataattgacaagatagtaattgtcaatggaaatattgaaatacagcttaagaatttttagcataaacttaatgcagttcctatagcatataggaagtgctaatgccgcatttatcacgttttacaattatataatttcagcattgtcgcttatatgtcgcacatatgtctattatgtgtcgctataagtgattttttttatgcaaaaatgtaactagaaagagaggtaatgtgaatgttttctgatgaagttagagaaaa

SEQ ID NO: 34628 - DNA, 109 bp, Unknown
  Description of Unknown: RightRegion for integrase B8629 sequence
ttaataaagaaaataaaaattaatgatataaaaaaatttgattttttaatagagttgtgatattctaaaaatagagaaattaaataaaatattatcttcagggcagggt

SEQ ID NO: 34629 - DNA, 260 bp, Unknown
  Description of Unknown: RightRegion for integrase B8630 sequence
ataattgacaagatagtaattgtcaatggaaatattgaaatacagcttaagaatttttagcacaaacttaatgcagttcctataacatataggaagtgctaatgccgcatttatcacgttttacaattatataatttcagcattgtcgcttatatgtcgcacatatgtctattatgtgtcgctataagtgattttttttatgcaaaaatgtaactagaaagagaggtaatgcgaatgttttctgatgaagttagagaaaa

SEQ ID NO: 34630 - DNA, 260 bp, Unknown
  Description of Unknown: RightRegion for integrase B8631 sequence
ataatagataggattgttatagtcaatggaaatattgaaatacagttaaagaatttttagcagaaacttaatgccatgggcatggcatataggaagtgctaatgccgtatttatcacgttttacaattatataattttaatgttgtcgcttatatgtcacacatatgtctatcatgtgtcgctttgagcgtctttttttatgccaaaatataatcagaaagagaggtagtgcgaatgttttctgatgaagttagagaaaa

SEQ ID NO: 34631 - DNA, 80 bp, Unknown; identical to SEQ ID NO: 34496
  Description of Unknown: RightRegion for integrase B8632 sequence

SEQ ID NO: 34632 - DNA, 260 bp, Unknown
  Description of Unknown: RightRegion for integrase B8633 sequence
ataatatcaaggattgtgattgtcaatggtgatgttgaaattcaattaaaaaatttttagcagaacctattgttatcggaaccgcgtaggtggaaaattttacaccaagcgtggaatcaaaattgtcgatggccttgatcagaccgatacagccgatctggaacagatcgtccacattttccgcactgccggaaaagcgtttgatcacgctcaggaccagacgcaggttgccttcgatgtaggtctctctggcggcggta

SEQ ID NO: 34633 - DNA, 260 bp, Unknown
  Description of Unknown: RightRegion for integrase B8634 sequence
ataatcgacaaagttgtgattgtaaacggagatgttgagatccagctacaacgtttttgatattaaataaggaaacaactagcacaagctatatgccatgcctatgatatataggttgtgctagatagcacatataacgctatatatggaggtgctggcatgaggacacgggaaaaaaagctgtcggattacggcgtaccaaacaccctatacagagagataaaagagcggtgttacaacagtacagacgaggatcgaga

SEQ ID NO: 34634 - DNA, 109 bp, Unknown
  Description of Unknown: RightRegion for integrase B8635 sequence
ttgataaagagaataaaaattaatgatataaaaaaatttgattttttaatagagttgtgatatcctaaaaatagagaaattaaataaaatattatcttcagggcagggt

SEQ ID NO: 34635 - DNA, 260 bp, Unknown
  Description of Unknown: RightRegion for integrase B8636 sequence
aagagttggaggatgaaaaatgacaaaaaaagtaacaacgataccagcattactaaataagcaatctacaaatcaggttggaatagtaaaaaagagaagagttgctgcatatgccagagtttcaacagaccaagaagaacaattaacaagttatgaggcacaggtcgattattataccaattatataaaatcaagagatgattgggaatttgtagatgtttatactgatgaaggaataagtggaacttcaaccaaacatc

SEQ ID NO: 34636 - DNA, 260 bp, Unknown
  Description of Unknown: RightRegion for integrase B8637 sequence
ataattgacaaggtaatcattgtcaatggcaatattgagatacagttaaagaatttttagcacttactgtatgcggttccgatgatagccggcgagataaaaagatttttaagggatgacggaatgctcaaggtaagccgttcgctcaaggagaatggatacaggataaagaaggcgtccgataagcttgtatcacagaacggaagggaggcaacgatagaggagcttgcggcagccacggagctgtcggttgaggatgt

SEQ ID NO: 34637 - DNA, 260 bp, Unknown
  Description of Unknown: RightRegion for integrase B8638 sequence
ataattgacaaggtaatcattgtcaatggcaatattgagatacagttaaagaatttttagcacttactgtatgcggttcctatgattataggcgaaataagaaggtacctgcgcgacacatcaagccagataagggtaagccgttcgcttaaggatacggcatacaaggcaatatatgcaagggaacgtctgtctaagacaaatctcagggaaccgacactcaacgagatagcaggtgagataggtgcgagccgtgaaga

SEQ ID NO: 34638 - DNA, 260 bp, Unknown
  Description of Unknown: RightRegion for integrase B8639 sequence
gaggagatatacatagataaggatacccacaagatctgcgggtttaaatttttactctgatggtgtagtaaactatataattcagttgaattcgagccaggcgccaccaaccttgaaaaagaaggcaaaggctatgttgttgcctctctcggaacagacagcggttatgtgccatacactgcattctccgcaaagcagagttatattgacaagaaccccaaagtcatccagggatttaccaatgcgctgcagaaaggcat

SEQ ID NO: 34639 - DNA, 260 bp, Unknown
  Description of Unknown: RightRegion for integrase B8640 sequence
ataattgacaagatagtgattgtcaatggaaatattgaaattcagttaaagaatttttagcacaaacttaatgcagttcctacagcgttaagttaatgctaatgccgtatttatcacgttttacaattatataattttaatgctgtcgcttatatgtcacacatatgtctattatgtgtcgctttgagcgtctttttttatgccaaaatgtaatcagaaagagaggtaatgcgaatgttttctgatgaaattagagaaaa

SEQ ID NO: 34640 - DNA, 260 bp, Unknown; identical to SEQ ID NO: 34533
  Description of Unknown: RightRegion for integrase B8641 sequence

SEQ ID NO: 34641 - DNA, 260 bp, Unknown
  Description of Unknown: RightRegion for integrase B8642 sequence
ataattgacaagataatcattgtcaacggaaatattgagatacaattaaagaatttttagcacttactgtatgccatccctatggcggtatgctagtgctaatgctgtatttatcgcgttttttcaaagggaaaattgaatatttgtcgcttttatgtcgccaagctgtcgctttaggcggctttttttatgccaaaatataagcaaaaggagggataaccgatgttgtcagacaaagtaattgagaagattttcgcaaa

SEQ ID NO: 34642 - DNA, 260 bp, Unknown; identical to SEQ ID NO: 34533
  Description of Unknown: RightRegion for integrase B8643 sequence

SEQ ID NO: 34643 - DNA, 260 bp, Unknown
  Description of Unknown: RightRegion for integrase B8644 sequence
ataatcgacaaagttgtgattgtcaacggagatgttgagatccagctacaacggttttgatattaaataaggaaacaactagcacaaactatatgccatgcctatgatatatagtttgtgctagataccacatataacgctatacatggaggtgctggcatgaggacgagggaaaaaaaactgtcggattacggtgtaccgaacaccctatacagagagataaaagagcggtgttgcaacagtacagacgaggatcgaga

SEQ ID NO: 34644 - DNA, 82 bp, Unknown
  Description of Unknown: RightRegion for integrase B8645 sequence
ataattgacaaggtaatcattgtcaatggcaatattgagatacagttaaagaatttttagcacttactgtatgcggttccta

SEQ ID NO: 34645 - DNA, 260 bp, Unknown
  Description of Unknown: RightRegion for integrase B8646 sequence
atagtagagaaaatcgtaatagtcaatggagatgtagaaattgtattaaagaacttttagcacatacatactgcacgtccgatggctgtagtttatgctaaacgccgtatttcctgtgtttacgaatagtggttgtcgcttatgtggcatgattttgacgctgagagcgtctttttttatgcgaaaattcaaataaaggggtggtgatatgttttcagatgtgcttttagaaaaaatattttgtgacgaaagaatgagac

SEQ ID NO: 34646 - DNA, 260 bp, Unknown
  Description of Unknown: RightRegion for integrase B8647 sequence
ataatagacaaaattgttatagtcaatggaaatatcgaaattcaattaaaaaatttttagcacaaactcaatgccgtgcccatgataattggggagataagacgttttttgagggataacagccagatacgggtgtcgaggtcgcttaaagatgtggcattcagggcaatatatgccaaagaaagaattatgaaaacagggaaggatgaacccacggttaatgaacttgccacggaaataggtgtaagcaaagaagaact

SEQ ID NO: 34647 - DNA, 260 bp, Unknown; identical to SEQ ID NO: 34619
  Description of Unknown: RightRegion for integrase B8648 sequence

SEQ ID NO: 34648 - DNA, 260 bp, Unknown
  Description of Unknown: RightRegion for integrase B8649 sequence
ataatagacaaaattgttatagtcaatggaaatatcgaaattcaattaaaaaatttttagcacaaacttaatgctgtgcccatgataattggggagataagacgttttttgagggataacagccagatacgggtgtcgaggtcgcttaaagatgtggcattcagggcaatatatgccaaagaaagaattatgaaaacagggaaggatgaacccacggttaatgaacttgccacggaaataggtgtaagtaaagaagaact

SEQ ID NO: 34649 - DNA, 260 bp, Unknown
  Description of Unknown: RightRegion for integrase B8650 sequence
ataattgacaagatagtaattgtcaatggaaatattgaaatacagcttaagaatttttagcataaacttaatgcagttcctacagcatataggaagtgctaatgccgcatttatcacgttttacaattatataatttcagcattgtcgcttatatgtcgcacatatgtctattatgtgtcgctataagtgattttttttatgcaaaaatgtaactagaaagagaggtagtgcgaatgttttctgatgaagttagagaaaa

SEQ ID NO: 34650 - DNA, 260 bp, Unknown
  Description of Unknown: RightRegion for integrase B8651 sequence
ataatagataagattgttatagtcaatggaaatattgaaatacagttaaagaatttttagcagaaacttaatgccatgggcatggcatataggaagtgctaatgccgtatttatcacgttttacaattatataatttcaatgctgtcgcttatatgtcgtacacatgtctattatgtgtcgctataagtgtctttttttatgtcaaaattaagtcagaaagagaggtaatgtgaatgttttctgatgaagttagagaaaa

SEQ ID NO: 34651 - DNA, 260 bp, Unknown
  Description of Unknown: RightRegion for integrase B8652 sequence
ataatcgacaaagttgtgattgtcaacggagatgttgagatccagctacaacggttttgatattaaataaggaaacaactagcacaaactatatgccatacctatgatatataggttgtgctagataccacatataacgctatatatggaggtgctggcatgaggacgagggaaaaaaagctgtcggattacggcgtaccaaacgccctgtacagagagataaaagagcggtgttataacagtacagacgaggatcgaga

SEQ ID NO: 34652 - DNA, 260 bp, Unknown
  Description of Unknown: RightRegion for integrase B8653 sequence
ataattgacaaaattgtaatagtcaatggaaatattgaaattcagttaaagaatttttagcatttactatatgctgtacctatggcagtatgctagtgctaatgccgtatttatcgcgtttttcaaaaagcaaaataaaatatttgtcgcttttatgtcgccaagctgtcgctttgagcgactttttttatgccaaaatataagcaaaggagggataacagatgttgtcggataaagtgaaagaaaaacttttcgcaaag

SEQ ID NO: 34653 - DNA, 260 bp, Unknown
  Description of Unknown: RightRegion for integrase B8654 sequence
ataatctctaaagtagtagttgtcaacggaaacgttgacattcaattaaaatctttttagcataaccttattaccgtccgatggttggcggatatgctaagtgccatatttcctatatgtcccaaatattaatgttataagtgtgtcggaattatgtcttttgaatgtcgctataagcgactttttttgtgcgaaaatacaaaatagataggaggtacgacctatgttttcggatgacttattaactattatattctcag

SEQ ID NO: 34654 - DNA, 260 bp, Unknown
  Description of Unknown: RightRegion for integrase B8655 sequence
ataattgacaagatagtaattgtcaatggaaatattgaaatacagcttaagaatttttagcataaacttaatgcagttcctataacatataggaagtgctaatgccgcatttatcacgttttacaattatataatttcagcattgtcgcttatatgtcgtacatatgtctattatgtgtcgctataagtgattttttttatgcaaaaatgtaactagaaagagaggtaatgcgaatgttttctgatgaagttagagaaaa

SEQ ID NO: 34655 - DNA, 260 bp, Unknown
  Description of Unknown: RightRegion for integrase B8656 sequence
ataattgacaagatagtaattgtcaatggaaatattgaaatacagcttaagaatttttagcacaaacttaatgcagttccgatgattacgggtgagattaaaagatttcttagagatgacggcataataaagataagccggagtattaaggaaaatggatacaaatgttttacggcttcccagaagttaaagggtattcttaaccgcgagccgactattgaggagctgtccagggaaacaggaatagcgacagaggatat

SEQ ID NO: 34656 - DNA, 260 bp, Unknown
  Description of Unknown: RightRegion for integrase B8657 sequence
ataattgacaaggtaatcattgtcaacggaaatattgagatacaattaaagaatttttagcacttactgtatgccatgccgatggcagtatgctagtgctaatgccgtatttatcgcgttttttcaaagtggaaattgaatatttgtcgcttttatgtcgccaagctgtcgctttagacggctttttttatgccaaaatataagcaaaaggagggataaccgatgttgtcagataaggtgattgagaagattttcgcaaa

SEQ ID NO: 34657 - DNA, 260 bp, Unknown; identical to SEQ ID NO: 34533
  Description of Unknown: RightRegion for integrase B8658 sequence

SEQ ID NO: 34658 - DNA, 260 bp, Unknown
  Description of Unknown: RightRegion for integrase B8659 sequence
attatagaccgcatcataattgatgatgataatgtcaatatcaaactaaaacatctatgatttaatctacaagttttcaaatactatgtgtatgggattcggatgcaacgcagcgggcatcgtgggctgccgcatcattgattctcccagggagcggctcattgccatgataaccaacaactttgtgccctgcaacggaaggtttcccaccctcatcgccattatctccatgttttttgtgggcgtatccggaggtgcct

SEQ ID NO: 34659 - DNA, 260 bp, Unknown; identical to SEQ ID NO: 34533
  Description of Unknown: RightRegion for integrase B8660 sequence

SEQ ID NO: 34660 - DNA, 260 bp, Unknown
  Description of Unknown: RightRegion for integrase B8661 sequence
ataattgaaaaaatagtaattagcaatggaaatattgagataaaattgaaagatttttagcactacaataatgctattctatggtatatatttactgctaatataggtatattgatttagcagtaaaatagtaccatacctatggtattgggttagtgctaatgcgcatatttactacacttttgagtcattatagtggcaattattagtcgctattaatggctctttttgttttatgataattacaaagggaggaataa

SEQ ID NO: 34661 - DNA, 260 bp, Unknown
  Description of Unknown: RightRegion for integrase B8662 sequence
ataatcgaaaagattgtaattgtcaatggaaatgttgaaattcaattgaaaaatttttagcactgactaataatcataggtatgattattagcttgtcgaaacgccgtgtttatcatactttcaagagctgcaaaaatcatatagtcgcttaaatgtcgttttcaagacgtttgaagcgactttttttttgccaaaatttaggtacaaggagggcatgatatgttttcggatgaaatacttgaaaagatttttggaagag

SEQ ID NO: 34662 - DNA, 260 bp, Unknown
  Description of Unknown: RightRegion for integrase B8663 sequence
ataatatcaaggattgtgattgtcaatggtgatgttgaaattcaattaaagaatttttagcagaacctattgttatcggagtggcaataggatgtgctaatgccgtatttatcatacttttaaaacttcatattttttcgtttgtcgcaaaagtgtcgtatatgtgtcactatatgcgactttttttatgccaaaatttaagcataaggagggatgaccttatgggaaaattcaaattttctgatgaaacactggaacat

SEQ ID NO: 34663 - DNA, 260 bp, Unknown
  Description of Unknown: RightRegion for integrase B8664 sequence
ataattgataaggtaattgtaggcaaggacgatatagaaattcagttaaagaacttttagcacctacataatgcagttcctatgatcataggtgagtgcagaaggtatctcagagataacaatgctataagagtatcaaggtcattgcgtgatatagcctacaaggcgatatatgccaaggaaaatctccagaagacaaaggataaggagccgacgatagaggagatagcggaggagataagtataccgaaggaagatat

SEQ ID NO: 34664 - DNA, 260 bp, Unknown
  Description of Unknown: RightRegion for integrase B8665 sequence
ataattgacaagataatcattgtcaatggcaatattgagatacagttaaagaatttttagcacttactgtatgctgtgcctacggcggtatgctagtgctaatgccgtatttatcgcgttttttcaaagtggaaattgaatatttgtcgcttttatgtcgccaagctgtcgctttaggcggctttttttatgccaaaatataagcaaaaggaggggtaaccgatgttgtcagacaaagtaattgagaagattttcgcgaa

SEQ ID NO: 34665 - DNA, 260 bp, Unknown
  Description of Unknown: RightRegion for integrase B8666 sequence
attgtagaccgcatcataattgatgatgataatgtcaatatcaagctaaagcagttataatctaatttacaagttttcttatactatgtgtatgggattcggatgcaacgcagcgggcattgtgggatgccgtatcattgattcccccagagaacggcttattgccatgataaccaacaactttgtgccatgcaacggaaggtttcccacactcatcgccatcatctccatgttctttgtgggtgtatccggaggcgcct

SEQ ID NO: 34666 - DNA, 260 bp, Unknown; identical to SEQ ID NO: 34540
  Description of Unknown: RightRegion for integrase B8667 sequence

SEQ ID NO: 34667 - DNA, 260 bp, Unknown
  Description of Unknown: RightRegion for integrase B8668 sequence
ataatagataaagttattatagtcaatggaaatgttgaaattcagttaaagaatttttagcatatacttaatgctacgggaacggcgtaggttgagaattgtacgccctgtgaaatatcaaaattatcaattgctttaatcatgccgacacagccaatctggaataaatcgtcaatattttcactgctttgtgaaaaacgctggacaatgcttaaaacaaggcgcagatttccgttaataaaacgctcgcgtgcctgtgt

SEQ ID NO: 34668 - DNA, 260 bp, Unknown; identical to SEQ ID NO: 34533
  Description of Unknown: RightRegion for integrase B8669 sequence

SEQ ID NO: 34669 - DNA, 260 bp, Unknown
  Description of Unknown: RightRegion for integrase B8670 sequence
ataattgataaagtgattgtaggcaaggatgatatagaaattcagttaaagaacttttagcacctacataatgcagttcctatgataataggggaatgtaggagatatctgagagacaacaatgcgataagggtgtcacgttccctccgcgatatagcgtacaaagcgatatacgcgaaggagaatctgcaaaagactagggataaggaacctacgatagaagagatagcggaggagataagtatacctaaggaagatat

SEQ ID NO: 34670 - DNA, 260 bp, Unknown
  Description of Unknown: RightRegion for integrase B8671 sequence
ataatagaaaaagtagttattgtcaatggtgatattgaaatacagttaaaaacgttttagcgtcaaaaatagccgtaggtacggcatataggaagtgctaatgccgtatttatcatacataattttatcaaaaaaatccatgtcacacaatagtctttagaatgtcgcttttagcgactttttttgtgcaataattcatatataggagaaaaaccatgattatgaattttagtccttttgagtttgaaataatgaacgag

SEQ ID NO: 34671 - DNA, 260 bp, Unknown; identical to SEQ ID NO: 34535
  Description of Unknown: RightRegion for integrase B8672 sequence

SEQ ID NO: 34672 - DNA, 260 bp, Unknown
  Description of Unknown: RightRegion for integrase B8673 sequence
ataattgacaaggtaatcattgtcaacggaaacatcgagatacaattaaagaatttttagcacttactgtatgccatgcctacggcggtatgctagtgctaatgccgtatttatcgcgttttttcaaaggggaaattgaatatttgtcgcttttatgtcgccaagctgtcgctttaggcggctttttttatgccaaaatataagcaaaaggagggataaccgatgttgtcagataaggtgattgagaagattttcgcgaa

SEQ ID NO: 34673 - DNA, 260 bp, Unknown
  Description of Unknown: RightRegion for integrase B8674 sequence
ataattgacaagataatcattgtcaacggaaatattgaaatacagttaaaaagtttttagcacttactgtatgctgtgcctatggcagcatgctagtgctaatgccgtatttatcgcgtttttcaaaaagggaaataaaatatttgtcgcttttatgtcgccaagttgtcactttaggtggctttttttatgccaaaatataaacaaaaggagggataacagatgttgtcggacaaagtgaaagaaaagctttttgcaaa

SEQ ID NO: 34674 - DNA, 83 bp, Unknown
  Description of Unknown: RightRegion for integrase B8675 sequence
ataattgataaggtaattgtaggcaaggacgatatagaaattcagctaaaaaacttttagcacttacataatgcagttcctat

SEQ ID NO: 34675 - DNA, 260 bp, Unknown
  Description of Unknown: RightRegion for integrase B8676 sequence
cgtactatcaggcgtattgagatcgatggaaagaaggtgtctaaggtgttttttatataatttttttattctttttgttgctattatgtcaccttgccacttgtaatagtaacataatagcaactagttaaataatatcaataaaagcaccgatttagtgcaaatatatactttacaaagtaccgaatcggtgctatgctatagccataacaaagaaaggaactaccaaaggtagcaagataaaggaaaatgaagagaga

SEQ ID NO: 34676 - DNA, 260 bp, Unknown
  Description of Unknown: RightRegion for integrase B8677 sequence
ataaaagaaatcttaattgaccctgagactcacgagctgaatggcataatatttttttagtttgttggtgtatcaaacatgctaactcaacagagttttctttttaatgcactaacttttcgtattccttccttatattataatccctaaatattaactacatttagggattatttcttgtatagcttatttactcttaataagcttgcctttctttagaagattcagcaaccttgtattctgcattgcactgccggtat

SEQ ID NO: 34677 - DNA, 260 bp, Unknown
  Description of Unknown: RightRegion for integrase B8678 sequence
ataatagataagattgttatagtcaatggaaatattgaaatacagttaaagaatttttagcagaaacttaatgccatgggcatggcatataggaagtgctaatgccgcatttatcacgtttttataattgcataattttaataatgtcgcttatgtgtcatatatatgtctattatatgtcgctatgagcgtctttttttatgccaaaatataatcagaaagagaggtagtgtaaatgttttctgatgaagttagagaaa

SEQ ID NO: 34678 - DNA, 260 bp, Unknown
  Description of Unknown: RightRegion for integrase B8679 sequence
atagtagagaaaatcgtaatagtcaatggagatgtagaaattgtattaaagaacttttagcacagacatactgcacgtccgatggcggtagtttatgctaaacgccgtatttcctgtgtttgcgaatagtggttgtcgcttatgtggcatgattttgacgctgagagcgtctttttttgtgcgaaaattcaaataaaggggtggtgatatgttttcagatgcgcttttagaaaaaatattttgtgacgaaagaatgagac

SEQ ID NO: 34679 - DNA, 260 bp, Unknown
  Description of Unknown: RightRegion for integrase B8680 sequence
gaacgttttgctgtactgtccgcaggatatgaggacgagcagaagaaattgaaagcgtaagcatcagagcttactgcttttattgaaacagcagagcagaaatgtgctgatgtgaactcctttataaaggtagtgcagaagtatgagcatatcacggaacttacttccgagatcatgcatgaacttatcgagaagatagttgtttacgctcctgaaaagagcgatgggcatcgtactcagcagatcgacatttattatcg

SEQ ID NO: 34680 - DNA, 260 bp, Unknown
  Description of Unknown: RightRegion for integrase B8681 sequence
ggaattgataaggtaattgtaggcaaggacgatatagaaattcagttaaagaacttttagcacctacataatgcagttcctatggcattaaggtggtgctataccgcatatacactacattctttttgacacatgacgcataatgcgtcttttttattgctattttttaggctgtatgttatgttgattgtgtacttaggaggtatattgatgattgatatatctaagctgataaaggctgaatatgagtacataagatt

SEQ ID NO: 34681 - DNA, 260 bp, Unknown
  Description of Unknown: RightRegion for integrase B8682 sequence
ataattgacaagataatcattgtcaatggaaatgttgagatacaattaaagaatttttagcacttactgtatgccatgcctatgataataggcgaaatcagaaggtatcttcgggatacctcaagccagataagagtcagccgttcattgaaggatatggcgtacaaagcaatatatgcgagggagcgccttgcaaagactgcatcaagggagccgacaatcaatgagatagcggatgagattggcgcaagcagggagga

SEQ ID NO: 34682 - DNA, 260 bp, Unknown
  Description of Unknown: RightRegion for integrase B8683 sequence
ataattgacaagatagtaattgtcaatggaaatattgaaatacagcttaagaatttttagcataaacttaatgcagttccaatgattactggggagattaagaggtatcttcgtgataacagtgcaataagagtaagccgttcattaaaggatatggcttataaggcactttatacaaaagaacagctattaaagagcaggcagaaggaaccgacaatatcggagattgcaagtgagataggagcatctaaggaggatat

SEQ ID NO: 34683 - DNA, 260 bp, Unknown
  Description of Unknown: RightRegion for integrase B8684 sequence
ataattgacaagataatcattgtcaacggaaacattgagatacagttaaagagtttttagcacttactgtatgcggtgccgatagcagtatgctagtgctaatgccgtatttatcgcgtttttcaaaaggaaaataaaatatttgtcgcttttatgtcgccaagctgtcactttgggcggctttttttatgccaaaatataagcaaaggagggataacagatgttgtcggacaaagtgaaagaaaaacttttcgcaaaga

SEQ ID NO: 34684 - DNA, 260 bp, Unknown
  Description of Unknown: RightRegion for integrase B8685 sequence
ataatagacaaaattgttatagtcaatggaaatatcgaaattcaattaaaaaatttttagcacaaacttaatgctgtgcctatgataattggggagataagacgttttttgagggataacagccagatacgggtgtcgaggtcgcttaaagatgtggcattcagggcaatatatgccaaagaaagaattatgaaaacagggaaggatgaacccacggttaatgaacttgccacggaaataggtgtaagcaaagaagaact

SEQ ID NO: 34685 - DNA, 80 bp, Unknown; identical to SEQ ID NO: 34542
  Description of Unknown: RightRegion for integrase B8686 sequence

SEQ ID NO: 34686 - DNA, 260 bp, Unknown; identical to SEQ ID NO: 34662
  Description of Unknown: RightRegion for integrase B8687 sequence

SEQ ID NO: 34687 - DNA, 260 bp, Unknown
  Description of Unknown: RightRegion for integrase B8688 sequence
ataattgaaaaaatcgtaattagcaatggaaatattgagataaaattgaaagatttttagcactacaataatgctatcctatggtatatatttactgctaatataggtatattaatttagcagtaaaatagcgccatacccatggcatggggttagtgctaatgcgcatatttactacactttagagtcactataatggcatttatttgtcacttatagtggctttttttattttatgcttattacaaagggaggaataa

SEQ ID NO: 34688 - DNA, 260 bp, Unknown
  Description of Unknown: RightRegion for integrase B8689 sequence
ataatatcaaggattgtgattgtcaatggtgatgttgaaattcaattaaagaatttttagcagaacctattgttatcggagtggcaataggatgtgctaatgccgtatttatcatacttttaaaactgcatatttttttgcttgtcgcaaaagtgtcgtatatgtgtcactatatgcgactttttttatgcaaaaatttaagcataaggagggatgaccttatgggaaaattcaaattttcagatgaaacactggaacat

SEQ ID NO: 34689 - DNA, 260 bp, Unknown
  Description of Unknown: RightRegion for integrase B8690 sequence
atagcagaggttagattaattaatgactttagagttatggtaataaccaatatattttagggagtttattatgataatttatgacaaaataaaaagcaagtatgatagatatgatatatatgagaaatttccaacaattacagcaaggaaaattctctttgaaagagatgttgtaagaatggatattatagctaaaaatatttccttagaggatataggttatactctccaagattatatacaggactatcataaggata

SEQ ID NO: 34690 - DNA, 260 bp, Unknown
  Description of Unknown: RightRegion for integrase B8691 sequence
aaatcactaattaataagatttatatcgacgatgaacaagttactattgaatggctctagtagcttgtttatttagattatttagtacctcgttatctctcgctggacgtaaagagggaacaaagcatctaataggtgtcactcataagccgcctattattattgaccctgttacttctacctatgtattccctactgtcgcgccaagttcaacagattgtatttggatttttccacagcatattaaggattatcatgca

SEQ ID NO: 34691 - DNA, 260 bp, Unknown
  Description of Unknown: RightRegion for integrase B8692 sequence
atcggaagaattgttgtaacaaatgaggatgatttttttgtttatccaatttcgccataataatattaacctgccggaaagcgaacgccccggagctgggagagtaccacaccttcgatatagccgtatacggccagctctggcgggaacccgtcaccgtgcttcgggacgtcgcattggatggggatctggtgtttcgcatggtccgaacgttcaacaggtgtcacctctcaccgttacacctgaaggacgctgtactg

SEQ ID NO: 34692 - DNA, 260 bp, Unknown
  Description of Unknown: RightRegion for integrase B8693 sequence
aatttgataaaggaaattaagtttaataaagattttaaaatagatgtagatttcttataatattcgtgttcataactacatatagccaagtggttaaagttagatatgaacataaaagaaacccttgataatcctatgttatcaggggttttctaatgtaccatactataaaattttataattaattccattacttctttttcattgtatctatcttgtatcatttctaacacctcatgatattcaatttcttctttcac

SEQ ID NO: 34693 - DNA, 260 bp, Unknown
  Description of Unknown: RightRegion for integrase B8694 sequence
attgtaaaagaaattcggtggtttccagatcggcacttagaatttgatatcaacacataacgttattttttgagaaaaagtattatacaattaattcccctcagtggatgggtattgattgtataatactattgccccgccttaaagcgaggcaatagcttataatgcctgaatctttcgcattacgctgttgtaaacccgctcgtttacaatgcgcagcgtatccatcagctcatccacaaccgcccacgcctttgccg

SEQ ID NO: 34694 - DNA, 260 bp, Unknown
  Description of Unknown: RightRegion for integrase B8695 sequence
atagcagaagttagattaattaatgactttagagttatggtaataaccaatatattttagggagtttattatgataatttatgacaaaataaaaagcaagtatgatagatatgatatatatgagaaattcccgacaattacagcaagaaaaattctttttgaaagagatgttgtaagaatggatattatagctaaaaatatttccttagaggatataggttatactctccaagattatatacaggactatcataaggaca

SEQ ID NO: 34695 - DNA, 260 bp, Unknown
  Description of Unknown: RightRegion for integrase B8696 sequence
gcaatagataaaatagtaatagacaaagaaggaaaaattcaagtctattttaatttttaaaaattatttacatatgcaggcggatttgttattgtttctctcatgagaaagaaatttgtgaaagaatatcattggatagaagaaaaggaaatcctaaatcttatagcaattgctcaatcatctcctggttcgctatctattaatatatctatattagttggatataaattggcaggtattccaggtgcattgatctctat

SEQ ID NO: 34696 - DNA, 260 bp, Unknown
  Description of Unknown: RightRegion for integrase B8697 sequence
tctataatagattatatagaaatagataataacaaaaacatcactattaattttatataattatttggactaacatatagtatccactaggtccgagtaaacatagaaattccccttcttcaatatccaaactaatattatttaaaacctttttttggtcataacttttaaacacattatttatttttaagtaactcatatcttatctctccttatatagttatttttttattttaaattttatatcctactttttcttc

SEQ ID NO: 34697 - DNA, 260 bp, Unknown
  Description of Unknown: RightRegion for integrase B8698 sequence
tgtgttgaaaaggtagttatcacaggagatgacatagacatacattttagcatatattaataggtactttctcgtgttccaaccatcatcccaacagcggtaggaagtggagaaaaggaagaaaagaccaagattctattatatgattaagaaaaataaagacggtagttgaaaatataaatatatagattaagagaaaaagattttgaaaataattgaaatcttttatttttttgcctgattagtaaacgatataaaaa

SEQ ID NO: 34698 - DNA, 260 bp, Unknown
  Description of Unknown: RightRegion for integrase B8699 sequence
tgtgttgaaaaggtagttatcacaggagatgacatagacatacattttagcatatattaataggtactttctcgtgttccaaccatcatccctatgattatcggagaaatcagaaggtacatgagagataataattccataagagtcagccggtcactcagagacactgcatacaaggcaatttatgctaaggaaaactatatgaagaagaatcagaaagagcctacagtacaggaaatcgctgaggagatcggaatatc

SEQ ID NO: 34699 - DNA, 260 bp, Unknown
  Description of Unknown: RightRegion for integrase B8700 sequence
tgtgttgaaaaggtagttatcacaggcgatgacatagacatacattttagcatatattaataggtactttctcgcgttccaaccatcatcccaacagcggtaggaagtggagaaaaggaagaaaagaccgagattctattatatgattaagaaaaataaagacggacctgtaaaaagtaaatatatagattaagagaaaaaagattttgaaaataatcgaaatctttcattttttacttgactagtggacaccactatgc

SEQ ID NO: 34700 - DNA, 260 bp, Unknown; identical to SEQ ID NO: 34698
  Description of Unknown: RightRegion for integrase B8701 sequence

SEQ ID NO: 34701 - DNA, 260 bp, Unknown
  Description of Unknown: RightRegion for integrase B8702 sequence
tgtgttgaaaaggtagttatcacaggagatgacatagacatacattttagcatatattaataggtactttctcgtgttccaaccatcatcccaacagcggtaggaagtggagaaaaggaagaaaagaccaagattctattagatgattaagaaaaataaagacggacctgtaaaatgtaaatatatagattaagagaaaaagattttgaaaataattgaaatcttttatttttttacttgactagtggacaccactatgc

SEQ ID NO: 34702 - DNA, 260 bp, Unknown
  Description of Unknown: RightRegion for integrase B8703 sequence
tgtgttgaaaaggtagttatcacaggcgatgacatagacatacattttagcatatattaataggtactttctcgtgttccaaccatcatcccaacagcggtaggaagtggagaaaaggaagaaaaggccaagattctattatataattaagaaaataaaggcgggagccggaaatataaatatatagattaagagaaaaagattttgaaaataattgaaatcttttatttttttacttgactagtggacaccactgtgct

SEQ ID NO: 34703 - DNA, 260 bp, Unknown; identical to SEQ ID NO: 34698
  Description of Unknown: RightRegion for integrase B8704 sequence

SEQ ID NO: 34704 - DNA, 260 bp, Unknown
  Description of Unknown: RightRegion for integrase B8705 sequence
tgtgttgaaaaggtagttatcacaggagatgacatagacatacattttagcatatattaataggtactttctcgtgttccaaccatcatcccaacagcggtaggaagtggagaaaaggaagaaaagaccaagattctattatatgattaatatgataaagacaggagctgaaaatataaatatatagattaagagaaaaagattttgaaaataattgaaatcttttatttttttacttgacaagtggacaccactatgct

SEQ ID NO: 34705 - DNA, 260 bp, Unknown
  Description of Unknown: RightRegion for integrase B8706 sequence
tgtgttgaaaaggtagttatcacaggcgatgacatagacatacattttagcatatattaataggtactttctcgcgttccaaccatcatccctatgattatcggagaaatcagaaggtacatgagagataataattccataagagtcagccggtcactcagagacactgcatacaaggcaatttatgctaaggaaaactatatgaagaagaatcagaaagagcctacagtacaggaaatcgctgaggagatcggaatatc

SEQ ID NO: 34706 - DNA, 260 bp, Unknown
  Description of Unknown: RightRegion for integrase B8707 sequence
tgtgttgaaaaggttgttatcacgggagatgacatagacatacattttagcatatattaataggtactttctcgtgttccaaccatcatcccaatgatcattggagagatcagaaggtacatgagagataacaattccattcgtgtcagccggtcactcagagatacggcatataaagcaatctatgcaagggaaagttacagaaagaagaaccagaaagaaccgacggtgcaggaaattgcgacagaaattggcatatc

SEQ ID NO: 34707 - DNA, 260 bp, Unknown
  Description of Unknown: RightRegion for integrase B8708 sequence
tgtgttgaaaaggtagttatcacaggagatgacatagacatacattttagcatatattaataggtactttctcgtgttccaaccatcatcccaacagcggtaggaagtggagaaaaagaagaaaagaccaagattctattatatgattaaaaaaagcaaagacgtgagccggaaatataaatatatagattaagagaaaagattttgaaaataattgaaatcttttatttttttacttgactagtggacaccactgtgat

SEQ ID NO: 34708 - DNA, 260 bp, Unknown
  Description of Unknown: RightRegion for integrase B8709 sequence
tgtgttgaaaaggtggttatcacaggtgatgacatagacatacattttagcatatattaataggtactttctcgtgttccaaccatcatcccaacaacggtaggaagtggagaaaaggaagaaaagaccaagattctattatgcgattaagataataaagactgtagttgaaaatataaatatatagattaagagaaaaagattttgaaaataattgaaatcttttatttttttacttgactagtggacaccactatgct

SEQ ID NO: 34709 - DNA, 260 bp, Unknown
  Description of Unknown: RightRegion for integrase B8710 sequence
tgtgttgaaaaggtggttatcacaggtgatgacatagacatacattttagcatatattaataggtactttctcgtgttccaaccatcgtccctatgattatcggagaaatcagaaggtacatgagagataataattccataagagtcagccggtcactcagagacactgcatacaaggcaatttatgctaaggaaaactatatgaagaagaatcagaaagagcctacagtacaggaaatcgctgaggagatcggaatatc

SEQ ID NO: 34710 - DNA, 260 bp, Unknown
  Description of Unknown: RightRegion for integrase B8711 sequence
ataattgataaggttgttattgtcaatgatgatgtaaaaatttttttgagggatttttagcacatcattacgcacccccgatggcgtaagttagtgctaatgccgtacttatcgtggttttattttgttgaataacatcaactggcagtttcctgtcatgtttctgtcttaatacagtcagttatttgtcgctttgagcgactttttttatgcaaaaatataattgcaaggagggatgatttgtatgttttcagaagaaa

SEQ ID NO: 34711 - DNA, 260 bp, Unknown; identical to SEQ ID NO: 34699
  Description of Unknown: RightRegion for integrase B8712 sequence

SEQ ID NO: 34712 - DNA, 260 bp, Unknown
  Description of Unknown: RightRegion for integrase B8713 sequence
tgtgttgaaaaggtggttatcacagaagatgacatagacatacattttagcatatattaataggtactttctcgtgttcccaccatcatccctatgattatcggagaaatcagaaggtacatgagagataataattccataagagtcagccggtcactcagagacactgcatacaaggcaatttatgctaaggaaaactatatgaagaagaatcagaaagagcctacagtacaggaaatcgctgaggagatcggaatatc

SEQ ID NO: 34713 - DNA, 260 bp, Unknown
  Description of Unknown: RightRegion for integrase B8714 sequence
tgtgttgaaaaggtagttatcacaggagatgacatagacatacattttagcatatattaataggtactttctcgtgttccaaccatcatcccaacagcggtaggaagtggagaaaaggaagaaaagaccaagattctattatatgattaagataataaagacgagaaccggaaatataaatatatagattaagagaaaaagattttgaaaacaattgaaatcttttatttttttacttgactagtggacaccactgtgct

SEQ ID NO: 34714 - DNA, 136 bp, Unknown
  Description of Unknown: RightRegion for integrase B8715 sequence
tgtgttgaaaaggtagttatcacaggagatgacatagacatacattttagcatatattaataggtactttctcgcattccaaccatcatcccaacagcggtaggaagtggagaaaaggaagaaaaggccaagattc

SEQ ID NO: 34715 - DNA, 94 bp, Unknown
  Description of Unknown: RightRegion for integrase B8716 sequence
tgtgttgaaaaggttgttatcacgggagatgacatagacatacattttagcatatattaataggtactttctcgtgttccaaccatcatcccaa

SEQ ID NO: 34716 - DNA, 260 bp, Unknown
  Description of Unknown: RightRegion for integrase B8717 sequence
ataattgacaaaattgtaatagtcaatgggaatatcgaaattcagttaaagaatttttagcacttcctgtctgccgtgggtacggcgtatagcttgtgctaatgccgcatttatcgtgtttattttatcaaatgtcgctgaaacgtcactaaaatgtcgtttgtggcgtctttttttatgcaaaaattaaagcataaggaggggtatacaatgttttctgacgatgtactggaaaaaattttcgcaagagaagaattgca

SEQ ID NO: 34717 - DNA, 260 bp, Unknown
  Description of Unknown: RightRegion for integrase B8718 sequence
tgtgttgaaaaggtagttatcgcaggagatgacatagacatacattttagcatatattaataggtactttctcgtgttccaaccatcatccctatgattatcggagaaatcagaaggtacatgagagataataattccataagagtcagccggtcactcagagacactgcatacaaggcaatttatgctaaggaaaactatatgaagaagaatcagaaagagcctacagtacaggaaatcgctgaggagatcggaatatc

SEQ ID NO: 34718 - DNA, 260 bp, Unknown
  Description of Unknown: RightRegion for integrase B8719 sequence
tgtgttgaaaaggtagttatcacaggagatgacatagacatacattttagcatatattaataggtacattctcgtgttccaaccatcatccctatgattatcggagaaatcagaaggtacatgagagataataattccataagagtcagccggtcactcagagacactgcatacaaggcaatttatgctaaggaaaactatatgaagaagaatcagaaagagcctacagtacaggaaatcgctgaggagatcggaatatc

SEQ ID NO: 34719 - DNA, 260 bp, Unknown
  Description of Unknown: RightRegion for integrase B8720 sequence
tgcgttgaaaaggtagttatcacaggagatgacatagacatacattttagcatatattaataggtactttctcgtgttccaaccatcatccctatgattatcggagaaatcagaaggtacatgagagataataattccataagagtcagccggtcactcagagacactgcatacaaggcaatttatgctaaggaaaactatatgaagaagaatcagaaagagcctacagtacaggaaatcgctgaggagatcggaatatc

SEQ ID NO: 34720 - DNA, 260 bp, Unknown
  Description of Unknown: RightRegion for integrase B8721 sequence
tgtgttgaaaaggtagttatcacagaagatgacatagacatacattttagcatatattaataggtactttctcgtgttccaaccatcatcccaatgatcattggagagatcagaaggtacatgagagataacaattccattcgtgtcagccggtcactcagagatacggcatataaagcaatctatgcaagggaaagttacagaaagaagaaccagaaagaaccgacggtgcaggaaattgcgacagaaattggcatctc

SEQ ID NO: 34721 - DNA, 260 bp, Unknown
  Description of Unknown: RightRegion for integrase B8722 sequence
tgtgttgaaaaggtagttatcacaggtgatgacatagacatacattttagcatatattaataggtactttctcgtgttccaaccatcatcccaacagcggtaggaagtggagaaaaggaagaaaagaccaagattctattatatgattaagaaaagcaaagactagagttgaaaatataaatatatagattaagagaaaaagattttgaaaataattgaaatcttttatttttttcctgactagtaaatgatataaaaaa

SEQ ID NO: 34722 - DNA, 260 bp, Unknown
  Description of Unknown: RightRegion for integrase B8723 sequence
tgtgttgaaaaggtagttatcgcagaagatgacatagacatacattttagcatatattaataggtactttctcgtgttcccaccatcatcccaacagcggtaggaagtggagaaaaggaagaaaagaccaagattctattatatgattaagataataaagactggagccggaaatataaatatatagattaagagaaaaagattttgaaaataattgaaatcttttatttttttacttgactagtggacaccactgtgct

SEQ ID NO: 34723 - DNA, 260 bp, Unknown
  Description of Unknown: RightRegion for integrase B8724 sequence
tgtgttgaaaaggtggttatcacaggagatgacatagacatacattttagcatatattaataggtactttctcgtgttccaaccattatcccaacagcggtaggaagtggagaaaaggaagaaaagaccaagattctattatacgattaaaaaaataaagatgagaaccgaaaatataaatatatagattaagagaaaaagattttgaaaataattgaaatcttttatttttttgcctgactagtaaacgatataaaaac

SEQ ID NO: 34724 - DNA, 260 bp, Unknown
  Description of Unknown: RightRegion for integrase B8725 sequence
tgtgttgaaaaggtagttatcacaggagatgacatagacatacattttagcatatattaataggtactttctcgtgttccaaccatcatcccaacagcggtaggaagtggagaaaaggaagaaaagaccaagattctattatataattaagataataaagatgagagccgaaaatataaatacatagattaagagaaaaaagattttgaaaataattgaaatcttttatttttttgcttggctagtaaacgatataaaaa

SEQ ID NO: 34725 - DNA, 260 bp, Unknown
  Description of Unknown: RightRegion for integrase B8726 sequence
tgtgttgaaaaggtagtcatcacaggggatgatatagacatacattttagcatatattaataggtactttctcgtgttccaaccatcatcccaacagcggtaggaagtggagaaaaggaagaaaagaccaagattctattatatggttaagaaaaacaaagacgggagtcagaaatataaacagatagattaagagaaaaagattttgaaaataattgaaatcttttatttttttacttgactattggttaccaatatag

SEQ ID NO: 34726 - DNA, 260 bp, Unknown; identical to SEQ ID NO: 34698
  Description of Unknown: RightRegion for integrase B8727 sequence

SEQ ID NO: 34727 - DNA, 260 bp, Unknown
  Description of Unknown: RightRegion for integrase B8728 sequence
tgtgttgaaaaggtagttatcacagaagatgacatagacatacattttagcatatattaataggtactttctcgtgttccaaccatcatcccaatgatcattggagaaatcagaaggtacatgagagataacaattctattcgtgtcagccggtcactcagagatacggcatataaagcaatctatgcaagggaaagttacagaaagaggaaccagaaagaaccgacggtgcaggaaattgcgacagaaattggcatatc

SEQ ID NO: 34728 - DNA, 260 bp, Unknown
  Description of Unknown: RightRegion for integrase B8729 sequence
gttataaagaatatcacgatagacgaagacttaaatataactcttgtttttcggtcgtaactagactactcctgtcggagctgtcctttttgtaccataaaaaaaagactaggaattatcctagcctgtttgtattatttttcttgattagtgaatactataaatgcgtacgcacctctcattataaatactctttctttaataacttcctgactaagactaggttaccgcctagtcttttttattttcctctaaaatag

SEQ ID NO: 34729 - DNA, 260 bp, Unknown
  Description of Unknown: RightRegion for integrase B8730 sequence
tgtgttgaaaaggtagttatcacaggagatgatatagacatacattttagcatatattaataggtactttctcgtgttccaaccatcatccctatgattatcggagaaatcagaaggtacatgagagataataattccataagagtcagccggtcactcagagacactgcatacaaggcaatttatgctaaggaaaactatatgaagaagaatcagaaagagcctacagtacaggaaatcgctgaggagatcggaatatc

SEQ ID NO: 34730 - DNA, 260 bp, Unknown
  Description of Unknown: RightRegion for integrase B8731 sequence
tgtgttgaaaaggttgttatcacagaagatgacatagacatacattttagcatatattaataggtactttctcgtgttcagaccatcatcccaacagcggtaggaagtggagaaaaggaagaaaagaccaagattctattatatgattaagaaaataaagacgggagccggaaatataaatatatagattaagagaaaaagattttggaaataattgaaatcttttatttttttacttgactagtggacaccactgtgct

SEQ ID NO: 34731 - DNA, 260 bp, Unknown
  Description of Unknown: RightRegion for integrase B8732 sequence
tgcattgataaaatagtgattatgaatggaaatgttgaaatacatttccatactatttgatttacattttcccctatctattttggctcccgtagcgtaggaaaggggaaaaagataaaatggctaggttttactcgattattacttgatatttacgtgtttaagacggtttgaccgtcttattttattggataatttagatacaggagatgatcgtatgtttaaagatgaaattcttgaaaaaatatttgcagacaatg

SEQ ID NO: 34732 - DNA, 260 bp, Unknown
  Description of Unknown: RightRegion for integrase B8733 sequence
tgtgttgaaaaggtagttatcgcaggagatgacatagacatacattttagcatatattaataggtactttctcgtgttccaaccatcatcccaatgatcattggagagatcagaaggtacatgagagataacaattccattcgtgtcagccggtcactcagagatacggcatataaagcaatctatgcaagggaaagttacagaaagaagaaccagaaagaaccgacggtgcaggaaattgcgacagaaattggcatatc

SEQ ID NO: 34733 - DNA, 260 bp, Unknown
  Description of Unknown: RightRegion for integrase B8734 sequence
ataatagaatcaatagaggttagtgttgatggaaatatcactattaatttcttgccctaatttatgtgcctaactgatactttccgctgggatggttgtggacgacgaacactcgggcggcactgtagcgtaccgcccaatgaaaaatctcccgtgggtgagcgatcgactgattcaacgatccgatgaagatcgtttttttctgaatgatctcatttttcgtattcaaataaagccctagtaaatgctcttgacgacaa

SEQ ID NO: 34734 - DNA, 260 bp, Unknown
  Description of Unknown: RightRegion for integrase B8735 sequence
tgtgttgaaaaggtggttatcacaggagatgacatagacatacattttagcatatattaaataggtactttctcgtgttccaaccatcatcccaacaacggtaggaaatggagaaaaggaagaaaagaccaagattctattatatgattaagaaaaacaaagacgggagccggaaatataaatatatagattaatagaaaaagattttgaaaataattgaaatcttttatttttttgcctaactagtagacgatataaaa

SEQ ID NO: 34735 - DNA, 260 bp, Unknown
  Description of Unknown: RightRegion for integrase B8736 sequence
tgcgttgaaaaggtagttatcacaggagatgacatagacatacattttagcatatattaataggtactttctcgtgttccaaccatcatcccaacagcggtaggaagtggagaaaaggaagaaaagaccaagattctattatgcgattaagataataaagacggtagttgaaaatataaatatatagattaagagaaaaagattttgaaaataattgaaatcttttatttttttacttgactagtggacaccactatgat

SEQ ID NO: 34736 - DNA, 260 bp, Unknown
  Description of Unknown: RightRegion for integrase B8737 sequence
tgtgttgaaaaagtggttatcacaggtgatgacatagacatacattttagcatatattaataggcactttctcgtgttccaaccatcatccctatgattatcggagaaatcagaaggtacatgagagataataattccataagagtcagccggtcactcagagacactgcatacaaggcaatttatgctaaggaaaactatatgaagaagaatcagaaagagcctacagtacaggaaatcgctgaggagatcggaatatc

SEQ ID NO: 34737 - DNA, 260 bp, Unknown
  Description of Unknown: RightRegion for integrase B8738 sequence
tgtgttgaaaaggtagttatcacaggagatgacatagacatacattttagcatatattaataggtactttctcgtgttccaaccatcatcccaacggcggtaggaagtggagaaaaggaagaaaaggccaagattctattatatgattaagataataaagacgagaaccggaaatataaatatatagattaagagaaaaagattttgaaaacaattgaaatcttttatttttttacttgactagtggacaccactatggt

SEQ ID NO: 34738 - DNA, 260 bp, Unknown
  Description of Unknown: RightRegion for integrase B8739 sequence
tgtgttgaaaaggtggttatcacaggagatgacatagacatacattttagcatatattaataggtactttctcgtgttccaaccatcatcccaacagcggtaggaagtggagaaaaggaagaaaagaccaagattctattatatgattaagaaaaacaaagacgggaaccgaaaatataaatatatagattaatagaaaaagattttgaaaataattgaaatcttttatttttttacttgactagtggacaccactatgg

SEQ ID NO: 34739 - DNA, 260 bp, Unknown
  Description of Unknown: RightRegion for integrase B8740 sequence
tgtgttgaaaaggtagttatcacggaagatgacatagacatacattttagcatatattaataggtactttctcgtgttccaaccatcatcccaacagcggtaggaagtggagaaaaggaagaaaagaccaagattctattatatgattaaaaaaagcgaagacgggaaccggaaatataaatatatagattaagagaaaagattttgaaaataattgaaatcttttattttttacttgactagtggacaccactatgcta

SEQ ID NO: 34740 - DNA, 260 bp, Unknown
  Description of Unknown: RightRegion for integrase B8741 sequence
tgtgttgaaaaggtagtcataacaggtgatgacatagacatacattttagcatatattaataggtgctttctcgtgttccaaccatcatccctatgattatcggagaaatcagaaggtacatgagagataataattccataagagtcagccggtcactcagagacactgcatacaaggcaatttatgctaaggaaaactatatgaagaagaatcagaaagagcctacagtacaggaaatcgctgaggagatcggaatatc

SEQ ID NO: 34741 - DNA, 260 bp, Unknown; identical to SEQ ID NO: 34704
  Description of Unknown: RightRegion for integrase B8742 sequence

SEQ ID NO: 34742 - DNA, 260 bp, Unknown; identical to SEQ ID NO: 34719
  Description of Unknown: RightRegion for integrase B8743 sequence

SEQ ID NO: 34743 - DNA, 260 bp, Unknown
  Description of Unknown: RightRegion for integrase B8744 sequence
tgtgttgaaaaggtagttatcacagaagatgacatagacatacattttagcatatattaataggtattttctcgtgttccaaccatcatcccaacagcggtaggaagtggagaaaaggaagaaaagaccgagattctattatacgattaagaaaaataaagacggacctgtaaaaagtaaatatatagattaagagaaaaaagattttgaaaacaattgaaatcttttatttttttacttgactagtggacaccactatg

SEQ ID NO: 34744 - DNA, 260 bp, Unknown
  Description of Unknown: RightRegion for integrase B8745 sequence
tgtgttgaaaaggtagttatcacaggagatgacatagacatacattttagcatatattaataggtactttctcgtgttccaaccatcacgccaacagcggtaggaagtggagaaaaagaagaaaagaccaagattctattatatgattaagataataaagacgggagcctaaaatataaatacatagattaatagaaaagattttgaaaataattgaaatcttttatttttttacttgactagtggacaccactgtgata

SEQ ID NO: 34745 - DNA, 260 bp, Unknown
  Description of Unknown: RightRegion for integrase B8746 sequence
tgtgttgaaaaggtagttatcacaggagatgacatagacatacattttagcatatattaataggtactttctcgtgttccaaccatcatcccaacagcggtaggaagtggagaaaaggaagaaaaggccaagattctattatatgattaagataataaagacgggagttgaaaatataaatatatagattaagagaaaaagattttgaaaataattgaaatcttttattttttacttgactagtggacaccactatgcta

SEQ ID NO: 34746 - DNA, 260 bp, Unknown
  Description of Unknown: RightRegion for integrase B8747 sequence
tgtgttgaaaaggtagttatcacaggagatgacatagacatacattttagcatatattaataggtactttctcgcattccaaccatcatcccaacagcggtaggaagtggagaaaaagaagaaaagaccaagattctattatatgattaagataataaagacgggagcctaaaatataaatacatagattaatagaaaagattttgaaaataattgaaatcttttatttttttacttgactagtggacaccactgtgata

SEQ ID NO: 34747 - DNA, 260 bp, Unknown; identical to SEQ ID NO: 34713
  Description of Unknown: RightRegion for integrase B8748 sequence

SEQ ID NO: 34748 - DNA, 260 bp, Unknown
  Description of Unknown: RightRegion for integrase B8749 sequence
tgtgttgaaaaggtggttatcacaggcgatgacatagacatacattttagcatatattaataggtactttctcgtgttccaaccatcatcccaacagcggtaggaagtggagaaaaggaagaaaaggccaagattctattatataattaagaaaaataaagacggacctgtaaaatgtaaatatatagattaagagaaaaagattttgagaataattgaaatcttttattttttacttgaccagtggacaccactgtgct

SEQ ID NO: 34749 - DNA, 260 bp, Unknown; identical to SEQ ID NO: 34712
  Description of Unknown: RightRegion for integrase B8750 sequence

SEQ ID NO: 34750 - DNA, 260 bp, Unknown
  Description of Unknown: RightRegion for integrase B8751 sequence
tgtgttgaaaaggtggttatcacaggtgatgacatagacatacattttagcatatactaataggtattttctcgtgttccaaccatcatcccaatgatcattggagagatcagaaggtacatgagagataacaattccattcgtgtcagccggtcactcagagatacggcatataaagcaatctatgcaagggaaagttacagaaagaagaaccagaaagaaccgacggtgcaggaaattgcgacagaaattggcatctc

SEQ ID NO: 34751 - DNA, 109 bp, Unknown
  Description of Unknown: RightRegion for integrase B8752 sequence
agcattataaaagaaatcatttacaatgaagataaaagctttgttatttattttatttaatacgtttactttctcattagttacatcaggaataacaagaagtaaaatc

SEQ ID NO: 34752 - DNA, 92 bp, Unknown
  Description of Unknown: RightRegion for integrase B8753 sequence
tgtgttgaaaaggtagttatcacaggagatgacatagacatacattttagcatatattaataggtactttctcgtgttccaaccatcatccc

SEQ ID NO: 34753 - DNA, 91 bp, Unknown
  Description of Unknown: RightRegion for integrase B8754 sequence
tgtgttgaaaaggtagttatcacaggtgatgacatagacatacattttaacatatattaataggtgctttctcgtgttccaaccatcatcc

SEQ ID NO: 34754 - DNA, 260 bp, Unknown
  Description of Unknown: RightRegion for integrase B8755 sequence
tgtgttgaaaaggtggttatcacaggtgatgacatagacatacattttagcatatactaataggtattttctcgtgttccaaccatcatcccaacagcggtaggaagtggagaaaaggaagaaaagaccaagattctattatatgattaagaaaaataaagacgggagccgaaaatataaatatatagattaaaagaaaaagattttgaaaataattgaaatcttttattttttgcctgactagtaaacgatataaaaga

SEQ ID NO: 34755 - DNA, 260 bp, Unknown
  Description of Unknown: RightRegion for integrase B8756 sequence
tgtgttgaaaaggtagttatcacaggtgatgacatagacatacattttagcatatattaataggtactttctcgtgttccaaccatcatcccaacagcggtaggaagtggagaaaaggaagaaaagaccaagattctattatatgattaagaaaaataaagacggtagttgaaaatataaatatatagattaagagaaaaagattttgaaaataattgaaatcttttatttttttacttgactagtggacaccactgtga

SEQ ID NO: 34756 - DNA, 260 bp, Unknown
  Description of Unknown: RightRegion for integrase B8757 sequence
tgtgttgaaaaggtagttatcacaggagatgacatagacatacattttagcatatattaataggtactttctcgtgttcccaccatcatcccaacagcggtaggaagtggagaaaaggaagaaaagaccaagattctattatatgattaagaaaaataaagacggtagttgaaaatataaatatatagattaagagaaaaagattttgaaaataattgaaatcttttatttttttgcctgactagtaaatgatataaaaa

SEQ ID NO: 34757 - DNA, 260 bp, Unknown
  Description of Unknown: RightRegion for integrase B8758 sequence
gtaatccggcagataatcgttgacgataacatgattgtgattgatgttatttttttataacgcttttggttacattatgtgacggttgcttgagcaaacaacaattaaagtagtacataaaatcccccgccggatctgctccgatgggggattcatttttatgctgccaggtactttcttgtggtcttacccgccagtccgtctgccgtaatcttgcaggacttctgatattcaatgatagctgctacggttttacgacc

SEQ ID NO: 34758 - DNA, 260 bp, Unknown
  Description of Unknown: RightRegion for integrase B8759 sequence
attaaagatattcaggtggatccggaaacccgcaaactatgcggttttcatttttactgatttaggagtagtatttatcgcgcactgtagaattcgagccccacgccacctctcttgaagaaaagggcgatggctacgtcgttgcttccttgggagaaagctccggctatgttccttacacggcgttcagtgcaaagaaaagctatattgaaaacaatcctgaaattatccagtcctttaccaatgcactgcaaaagggc

SEQ ID NO: 34759 - DNA, 260 bp, Unknown
  Description of Unknown: RightRegion for integrase B8760 sequence
gtaatccgacagataatcgttgacgataacatgaatgtgattgatgttatttttttataacgcttttggttaccttatatgacggttgcttgagcaagcaataattaaggtagtacataaaatcccctaccggatctgctccgatgggggattaaaactatgctgccaggtactttcttgtggtcttgcccgccagtccgtcggctgtgatcttgcaggacttctgatatgtaatgattgctgctacggtcttggaaccg

SEQ ID NO: 34760 - DNA, 260 bp, Unknown
  Description of Unknown: RightRegion for integrase B8761 sequence
gtgatccggcagataatcgttgacgataacatgaatgtaattgatgttatttttttataacgcttttggttaccttatgtgacgtttgcttgagcaagcaacaattaaggcagtacataaatcccccgccggatatgctccgatgggggattgcttcttaattataaaatactgcctgtatgctgttgtatccaacttttccgtcttttaccaagtttagctttccctgcactgcaatggtctcttttcgcgcatctttt

SEQ ID NO: 34761 - DNA, 260 bp, Unknown; identical to SEQ ID NO: 34759
  Description of Unknown: RightRegion for integrase B8762 sequence

SEQ ID NO: 34762 - DNA, 260 bp, Unknown
  Description of Unknown: RightRegion for integrase B8763 sequence
gtaatccggcagataatcgttgacgataacatgaatgtaattgatgttatttttttataacgcttttggttaccttatatgatggttgcttgagcaagcaacagttaaggcagtacataaatcccccgccggatatgctccgatgggggattaaaactatgctgccaggtactttcttgtggtcttgcccgccagtccgtcggctgtgatcttgcaggacttctgatatgtaatgattgctgctacggtcttggaaccgc

SEQ ID NO: 34763 - DNA, 260 bp, Unknown
  Description of Unknown: RightRegion for integrase B8764 sequence
gtaatccggcagataatcgttgacgataacatgaatgtaattgatgttatttttttataacgcttttggttaccttatatgatggttgcttgagcaagcaacagttaaggcagtacataaatcccccgccggatatgctccgatgggggattaaaactatgctgccaagtactttcttgtggtcttacccgccagtccgtctgcagtaatcttgcaggacttctgatatgtcaggattgctgctacggtcttacgaccgc

SEQ ID NO: 34764 - DNA, 260 bp, Unknown
  Description of Unknown: RightRegion for integrase B8765 sequence
gtaatccggcagatagtcgttgacgataacatgaatgtaattgatgttatttttttataacgcttttggttgccttatgtgacggttgcttgatcaaacaacaattaaggcagtacataaaatcccccgccggatctgatccgatgggggattgcttcttaattataaaataccgcctgtatgctgttgtatccaacttttccgtcttttaccaagttcagcttgccctgcactgcaatggtctcttttcgcgcatcttt

SEQ ID NO: 34765 - DNA, 260 bp, Unknown
  Description of Unknown: RightRegion for integrase B8766 sequence
gtgatccggcagataatcgttgacgataacatgaatgtaattgatgttatttttttataacgcttttggttaccttatgtgacggttgcttgagcaagcatcagttaaagtagtgcataaaatcccccgccggatctgctccgatgggggattgcttcttaattataaaataccgcctgtatgctgttgtatccaacttttccgtcttttaccaagtttagcttgccctgcactgaaatggtctcttttcgcgcatcttt

SEQ ID NO: 34766 - DNA, 260 bp, Unknown
  Description of Unknown: RightRegion for integrase B8767 sequence
gtgatccgacagataatcgttgataataacatgaatgtgattgatgttatttttttataacacttttggttaccttatgtgacggttgcttgagcaaacaacaattaaggcagtacataaatcccccgccggatattctccgatggggaattgcttcttaattataaaatactgcctgtatgctgttgtatccaacttttccgtcttttaccaggttcagcttgtcctgcactgcaatggtctcttttctcgtatctttt

SEQ ID NO: 34767 - DNA, 260 bp, Unknown
  Description of Unknown: RightRegion for integrase B8768 sequence
agtgtaattaagcgtataatcataaaagataagcaaatacaggaaataatattcaaataaaaatagccccaagcgttgaatttaacgcctggggctttagtatgtacttatttaactattccattgggtcccaaaagcccaacaatttctccttttttaaaatataaatttagcttatctaaaacaagtttatttttgtatgcaatagataaatttttaatctctaacattagtccacctcccaaaatttatcaagacca

SEQ ID NO: 34768 - DNA, 260 bp, Unknown
  Description of Unknown: RightRegion for integrase B8769 sequence
attaaagatattcaggtagatccggaaacccgcaaactatgcggttttcatttttactgatttaggagtagtatttatcacgcactgtagagtttgagccccacgccacctctcttgaagaaaaaggcgatggctacgtcgttgcttccttaggagaaagctccggctatgttccttacacggcgttcagtgcaaagaaaagctatattgaaaacaatcctgaaattatccagtcctttaccaatgcgctgcaaaagggc

SEQ ID NO: 34769 - DNA, 260 bp, Unknown
  Description of Unknown: RightRegion for integrase B8770 sequence
gtaatccggcagataatcgttgacgataacatgaatgtgattgatgttatttttttataacacttttggttaccttatgtgacgtttgcttgagcaagcaataattaaggtagtacataaaatcccccaccggatctgctccgatgggggattaaaactatgctgccaggtactttcttgtggtcttacccgccagtccgtctgctgtaatcttgcaagacttctgatatgtaatgatagctgatacggtcttacgaccg

SEQ ID NO: 34770 - DNA, 260 bp, Unknown
  Description of Unknown: RightRegion for integrase B8771 sequence
gtgatccggcagataatcgttgatgataacatgaatgtgattgatgttatttttttataacgcttttggttaccttatgtgacggttgcttgagcaagcatcagttaaggtagtacataaaatcccccgccggatctgctccgatgggggattgcttcttaattataaaataccgcctgtatgctgttgtatccaacttttccgtcttttaccaagttcagcttgccctgcactgcaatggtctcttttcgcgcattttt

SEQ ID NO: 34771 - DNA, 260 bp, Unknown
  Description of Unknown: RightRegion for integrase B8772 sequence
attaaagatattcaggtggatccggaaacccgcaaactatgcggttttcatttttactgatttaggagtagtatttatcgcgcactgtagagtttgagccccacgccacctctcttgaagaaaaaggcgatggctacgtcgttgcttccttaggagaaagctccggctatgttccttacacggcgttcagtgcaaagaaaagctatattgaaaacaatcctgaaattatccagtcctttaccaatgcactgcaaaagggc

SEQ ID NO: 34772 - DNA, 260 bp, Unknown
  Description of Unknown: RightRegion for integrase B8773 sequence
attaaagatattcaggtggatccggaaacccgcaaactatgcggttttcatttttactgatttaggagtagtatttatcgcgcactgtagaattcgagccccacgccacctctcttgaagaaaagggcgatggctacgtcgttgcttccttgggagaaagctccggctatgttccttacacggcgttcagtgcaaagaaaagctatattgaaaacaatcctgaaattatccagtcctttaccaatgcgttgcaaaagggc

SEQ ID NO: 34773 - DNA, 260 bp, Unknown; identical to SEQ ID NO: 34762
  Description of Unknown: RightRegion for integrase B8774 sequence

SEQ ID NO: 34774 - DNA, 260 bp, Unknown; identical to SEQ ID NO: 34764
  Description of Unknown: RightRegion for integrase B8775 sequence

SEQ ID NO: 34775 - DNA, 145 bp, Unknown
  Description of Unknown: RightRegion for integrase B8776 sequence
gtgatccggcagataatcgttgatgataacatgaatgtgattgatgttatttttttataacgcttttggttaccttatatgatggttgcttgatcaagaagcaggaagagcagatgaaataagctctgtctgaagcttcgcaatc

SEQ ID NO: 34776 - DNA, 260 bp, Unknown
  Description of Unknown: RightRegion for integrase B8777 sequence
attaaagatattcaggtggatccggaaacccgcaaactatgcggttttcatttttactgatttaggagtagtatttatcgcgcactgtagagtttgagccccacgccacctctcttgaagaaaaaggcgatggctacgtcgttgcttccttaggagaaagctccggctatgttccttacacggcgttcagtgcaaagaaaagctatattgaaaacaatcctgaaattatccagtcctttaccaatgcgttgcaaaagggc

SEQ ID NO: 34777 - DNA, 260 bp, Unknown
  Description of Unknown: RightRegion for integrase B8778 sequence
gtgatccggcagataatcgttgacgataacatgaatgtaattgatgttatttttttataacgcttttggttaccttatgtgacgtttgcttgatcaagaagcaggaagagcagatgaaataagctctgccggaatcctcggaatcgacaggaacaaaaaagaagctgtacagagaatccctctgtacagcttcttaactgtgttcatcttatttattattcaccgaagactgctctgtaatctgcctggaacttggcaat

SEQ ID NO: 34778 - DNA, 260 bp, Unknown
  Description of Unknown: RightRegion for integrase B8779 sequence
gtgatccggcagataatcgttgacgataacatgaatgtaattgatgttatttttttataacgcttttggttaccttatgtgacgtttgcttgagcaagcaacaattaaggcagtacataaatcccccgccggatctgctccgatgggggattgcttcttaattataaaataccgcctgtatgctgttgtatccaacttttccgtcttttaccaagttcagcttgccctgcactgcaatggtctcttttcgcgcatctttt

SEQ ID NO: 34779 - DNA, 260 bp, Unknown
  Description of Unknown: RightRegion for integrase B8780 sequence
attaaagctattcaggtggatccggaaacccgcaaactatgcggttttcatttttactgatttaggagtagtatttatcgtgcactgtagagtttgaaccccacgccacctctcttgaagaaaaaggcgatggctacgtcgttgcttccttaggagaaagctccggctatgttccttacacggcgttcagtgcaaagaaaagctatattgaaaacaatcctgaaattatccagtcctttaccaatgcgctgcaaaagggc

SEQ ID NO: 34780 - DNA, 260 bp, Unknown
  Description of Unknown: RightRegion for integrase B8781 sequence
aaaaacttaattgtagaccctcatggcaaaataacaattaattttttaacaaaaaattagccacttttaggaactgtcctactagtaacgcttggcgctatcaatgcaacagccattaaaaaatgcatgccccacttcacttttttaaagctcaactttttcacaaatttcctccttgtgtttcaacccatttgcaacaaacaattgtcaaagtaacaaacaacaaaaagagccttcccccatcacgctgctcttctttt

SEQ ID NO: 34781 - DNA, 260 bp, Unknown
  Description of Unknown: RightRegion for integrase B8782 sequence
tgcgttgaagatatagtggttgacaaggacgaaattacgattcgttttgttactttataatatacttcaactttctaactatcattggaccgaaatatagaaagttgaaattcataaatggctaggtttttattctgttttactaataatatactgataatttgcgataatttgacggtttaaccgtctttttttatgcgaaaatttaagtggaaggaggatgaggtatgttttctgatgaagttttagaaaagattttt

SEQ ID NO: 34782 - DNA, 260 bp, Unknown
  Description of Unknown: RightRegion for integrase B8783 sequence
tgtgtagaaaaaataataataaaagggagcgacatagaagtcagcttcgttactttttaatatatttctgcttcctatattcattcctgcgattataggaagacgaaaaagctgaaatggctagtttttattctatttttacagtttgtatatagttattttgctgatataggacggttttgccgtctttttttatgccaaaatgtaagcagaaggagggagaaaagaatgttttcagatgaaattttagaaaagatttt

SEQ ID NO: 34783 - DNA, 260 bp, Unknown
  Description of Unknown: RightRegion for integrase B8784 sequence
aggctaatacaagagattaagttagatggaaagaccatcaaacgggtcatatttttttaaataaaaatccggtgtatctgtacatagtcaactgacgttgtccggttacacctgaaaaataaaaggagtagaaacctatgcgtgacaaggatttgaagagtaaagaggaaagaatatgggagatgtacattaaagcttatatatcagagaaacaattttacaagatgttagaacgtattaagaaagaggtgaaaacagat

SEQ ID NO: 34784 - DNA, 109 bp, Unknown
  Description of Unknown: RightRegion for integrase B8785 sequence
aaaaacttacttgtagaccctcatggcaaaataacaattaattttttaacaaaaaattagccacttttaggaaatgtcctactagtaacgcttggcgctatcaacgcaa

SEQ ID NO: 34785 - DNA, 260 bp, Unknown
  Description of Unknown: RightRegion for integrase B8786 sequence
tgcattgaaaggattgttattaacggaaacgatatagaaattcgttttgttactttttaatagatttttcaacttacctactgttgctccaatgatatcaggtgaaatccggagatttttgcgggatgacggcatgattaaggtaagccgttctttaaaagaactggcaggaaaagtatttcttgtaaaagaagaattatcggactgttatggacgggatccaaccgtagaagagattgcagggaagcttggggtaagca

SEQ ID NO: 34786 - DNA, 260 bp, Unknown
  Description of Unknown: RightRegion for integrase B8787 sequence
tgcgttgaagatatagtggttgacaaggacgaaattacgattcgttttgttactttgtaatatacttcaactttctaagtatcgctggaccgaaatatagaaagttgaaattcataaatggataggtttttattctgttttactaataatatactgataatttgcgataatttgacggtttaaccgtctttttttatgcgaaaatttaagtggaaggaggatgaggtatgttttctgatgaagttttagaaaagattttt

SEQ ID NO: 34787 - DNA, 260 bp, Unknown
  Description of Unknown: RightRegion for integrase B8788 sequence
aaaaacttaattgtagaccctcatagcaaaataacaattaattttttaacaaaaaattagccacttttaggaactgtcctactggataattccatttaacgcaaacaaaaaacctcgttccctagaagagagcgaggtttttttatggaccatacaggactcgaacctgtgaccgaacggttatgagccgtttgctctaaccaactgagctaatggtcctgaaaaaacgctctgcctttaaagcagagcgtttcgaatac

SEQ ID NO: 34788 - DNA, 260 bp, Unknown
  Description of Unknown: RightRegion for integrase B8789 sequence
aaaaacttaattgtagaccctcatggcaaaataacaattaattttttaacaaaaaattagccacttttaggaactgtcctactggatatttccatttagcgcaaacaaaaaaacctcgttccctagaagagagcgaggttttttatggaccatacaggactcgaacctgtgaccgaacggttatgagccgtttgctctaaccaactgagctaatggtcctgaaaaaatacctcttaaataataagaggtattaataaatt

SEQ ID NO: 34789 - DNA, 260 bp, Unknown
  Description of Unknown: RightRegion for integrase B8790 sequence
ttcatcaaagagctccatatctaccgggggaccatccagggcccgccgattttttggtgattttttgttgtagttattgacaggaatagaacgcccttggatattccacccgcacactggacggcatcttcggcgccaacaccgagaacgcgctgaaagcattccagcgtgcggtggggcttaccgccgacggcatctgcggctgccgttcctggaaaaagctcactgctgctgtagtgggaatcggccgcaccaaaacg

SEQ ID NO: 34790 - DNA, 260 bp, Unknown
  Description of Unknown: RightRegion for integrase B8791 sequence
aggctgatacaagagattaagttagatggaaagaccatcaaacgggtcatatttttttaaataaaaatccggtgtatctgtacatagtcaactgacgttgtccggttacaccggaaaaataaaaggagtagaaacctatgcgtgacaaggatttgaagagtaaagaggaaagaatatgggagatgtacattaaagcttatatatcagagacacagttttacaagatgttagaacgtattaagaaagaggtgaaaacagat

SEQ ID NO: 34791 - DNA, 260 bp, Unknown
  Description of Unknown: RightRegion for integrase B8792 sequence
ttccttaaagaattgcacatctaccgcggcacaattcaaggcccgcctatttttctataatccagttgtagttattgacatagatagaacgcacttggatattctacttgcacgctggacggcattttcggcaataatacagagaccgccctcaaggccttccagcgctctgtcggcctcaccgcagacggcatctgcggctgcaattcctggaaaaagctcacaagcgccgtggtgggcatcggccgcaccaggactgt

SEQ ID NO: 34792 - DNA, 260 bp, Unknown
  Description of Unknown: RightRegion for integrase B8793 sequence
ttgattgattacattgaagttgacaagcaaaagaacatgacgatttatttcaggcggtagaaaccgcctttttaatcgtcttttatgttggtaagtatgaaaaacgcttcctgcggagtgtgatttttatttacatacaggcaatttttttatgaagcttataaactatatcaaaaaaaagaaaaaagatcaatttacagatatttttctaaaaactgtgcaaagaaaacctatgaaataagaattttgaatcaaaagtt

SEQ ID NO: 34793 - DNA, 260 bp, Unknown
  Description of Unknown: RightRegion for integrase B8794 sequence
tgcgttgaagatatagtggttgacaaggacgaaattacgattcgttttgttactttataatatacttcaactttctaagtatcgctggaccgaaatatagaaagttgaaattcataaatggataggtttttattctgttttactaataatatactgataatttgcgataatttgacggtttaaccgtctttttttatgcgaaaatttaagtggaaggaggatgaggtatgttttctgatgaagttttagaaaagattttt

SEQ ID NO: 34794 - DNA, 260 bp, Unknown
  Description of Unknown: RightRegion for integrase B8795 sequence
tgtgtagaaaaaataataataaaagggagcgacatagaagtcagcttcgttactttttaatatatttctgcttcctatattcattcccgcgattataggaagacgaaaaagctgaaatggctagtttttattctatttttacagtttgtatatagttattttgctgatataggacggttttgccgtctttttttatgccaaaatgtaagcagaaggagggagaaaagaatgttttcagataaaattttagaaaagatttt

SEQ ID NO: 34795 - DNA, 260 bp, Unknown
  Description of Unknown: RightRegion for integrase B8796 sequence
ttccttaaagaattgcacatctaccgcggcacaattcaaggcccgcctatttttctataatccggttgtagttattgacatagatagaatgcgcttgggtactctacccgcacgctggacggcattttcggcaacaataccgaaacggccctcaaggcgtttcagcgctcggtgggcctcacggcagacggcatctgcggctgcaattcctggaaaaagcttaccagcgccgtggtgggcattggccgcacccaaaccgt

SEQ ID NO: 34796 - DNA, 135 bp, Unknown
  Description of Unknown: RightRegion for integrase B8797 sequence
tgcgttgaagatatagtggttgacaaggacgaaattacgattcgttttgttactttgtaatatacttcaactttctaaatatcattggaccgaaatatagaaagttgaaattcataaatggctaggtttttattc

SEQ ID NO: 34797 - DNA, 260 bp, Unknown; identical to SEQ ID NO: 34782
  Description of Unknown: RightRegion for integrase B8798 sequence

SEQ ID NO: 34798 - DNA, 260 bp, Unknown
  Description of Unknown: RightRegion for integrase B8799 sequence
tctgttataaaagaaattcaaattgacgatcgtagaaatttaaaggtcatttttttatgacttttttgtagtagtaactatgagcagcctgtcggttcatcagccaggacgattgcaggctttgacaccaaagcgcgggcaatggctacgcgctgctgctggccgccggaaaggttattgggcatattgttcagcttatcctccagccccagcatctgaacgacttctttcataaacttcttgtctaccttgtttccgtc

SEQ ID NO: 34799 - DNA, 260 bp, Unknown
  Description of Unknown: RightRegion for integrase B8800 sequence
agaacggtgcagcgcatcgaggcggatgataacggtgcgttttttgtaacgccagtttaggcatattttctcttagcattaggcaacagcaaatatacctaaaacgaaaacgtgagctaaaccggcggttatatgtcgatttagcccacgtctttgattaaatcctatctattttgcgcatgacattatcatagacgcgcctgttggtgattgcaaggctgtccatcaactcgtccatgatgggccacagcttatcaggc

SEQ ID NO: 34800 - DNA, 145 bp, Unknown
  Description of Unknown: RightRegion for integrase B8801 sequence
tctgttataaaagaaattcaaattgacgatcgtagaaatttaaaggtcatttttttatgacttttttgtagtagtaactaagagtatcctgttggttattcttagttactactactaattatggttcctgattgtttcaggagct

SEQ ID NO: 34801 - DNA, 260 bp, Unknown
  Description of Unknown: RightRegion for integrase B8802 sequence
tgcattgagaaagttgtgattagtggtaacgatttggagatacgttttatcacattttgatagatttcaacttacctacagtaagccccgtgagtgtgggtaagacgaaaaacagaaatggctaggtatttattctatttttactaataatttactgataatgtgcgacaacttgacggtttaaccgtctttttttgtgcgaaaatttaattagaaggaggatgagatatgttttcggatgaagttttagaaaagatttt

SEQ ID NO: 34802 - DNA, 260 bp, Unknown
  Description of Unknown: RightRegion for integrase B8803 sequence
tgtatagagagaattatcattacagggagcgatatagaaattcgcttcattactttataatatattctcccatatcttactatcgcgggagcgaacgttagaaaggggagaaaaccggaaatggctaggttttattctatttttactgtttacatattgttattttgaagagttgagacggttttgccgtctttttttatgccagaatataagcagaaggagggagaaaagaatgttttcagatgaaattttagaaaaga

SEQ ID NO: 34803 - DNA, 260 bp, Unknown
  Description of Unknown: RightRegion for integrase B8804 sequence
agaacagtgaagcgcatcgaagcggatgataacggtgcgttttttgtaacgcctgtttaggtgtattttctctttagattaggcaacagcaaatatacctaaaatgaaaacgtgagctaaaccggcggttatatgtcgatttagcccacgttttttgattaaatcctatctattttgcgcatgacattatcatagacgcgcctgttggtgattgcaaggctgtccatcaactcgtccatgatgggccacagcttatcggg

SEQ ID NO: 34804 - DNA, 260 bp, Unknown
  Description of Unknown: RightRegion for integrase B8805 sequence
tgcatagacaagattgtgattactgacggaaatatagacatctattttaatttgctctaatttccctttcctataatcgtcccgatgattataggaagtagaaataaccagaattgaccgagaatctatcgaaaaaaacagcggaaaatgcgagatcgcaatgtaaaactaactgtaaggataatgttagctgcctagataaagaaaaagatatagaaagagataaatataatactgtggggagaaagttccacattatt

SEQ ID NO: 34805 - DNA, 260 bp, Unknown; identical to SEQ ID NO: 34507
  Description of Unknown: RightRegion for integrase B8806 sequence

SEQ ID NO: 34806 - DNA, 260 bp, Unknown
  Description of Unknown: RightRegion for integrase B8807 sequence
tctgttataaaagaaattcaaattgacgatcgtagaaatttaaaggttatttttttatgacttttttatagtagtaactaagagtatcctgttggttattcatagttactactaccaaatacagctcctgattatttcaggagctgtattctgtttatcaaattgcaatcagatctttccatgttgccggtccgcacactccgtcaacttcaaggactccgtttctgtccttctggtatgctttaagcgcatagattgta

SEQ ID NO: 34807 - DNA, 260 bp, Unknown
  Description of Unknown: RightRegion for integrase B8808 sequence
tctgttataaaagaaattcaaattgacgatcgtagaaatttaaaggtcatttttttatgacttttttgtagtagtaactatgaacagcctgttggttattcttagttactactaccaattatggttcctgattgtttcaggagctttttgttaaattgcaatcagatctttccatgttgccggtccacatactccgtcaacctcaaggactccgtttctgtctttctgatatgccttgagtgcataaattgtattgtctc

SEQ ID NO: 34808 - DNA, 260 bp, Unknown
  Description of Unknown: RightRegion for integrase B8809 sequence
cgcactatcagaaggattgaaattgatggtaagaaggtgactaaggtattttttgtgtaattttttttacgtttctcgttgctattatgttaccttgccatctgtaatagtgacataatagcaactagttaaataatatcaataaaaaacaccgatttagtgcaaatatatactttacaaagtaccgaatcggtgctatactatagccataacaaagaaaggaactaccaaaggtagtaaggtaaaggaaaatgagaaac

SEQ ID NO: 34809 - DNA, 260 bp, Unknown
  Description of Unknown: RightRegion for integrase B8810 sequence
tctgttataaaagaaattcaaattgacgatcgtagaaatttaaaggtcatttttttatgacttttttgtagtagtaactatgagcagcctgttggctcgtctgccagaatcagagaaggacgggtaatcaatgcacggccaatcgccactctctgctgttgaccgccggaaagctgactgggtaaatgattacgacgatctttcaaattcaaaaccgtcagcagttcctccaaatatctcttgtccggcttttgataatc

SEQ ID NO: 34810 - DNA, 142 bp, Unknown
  Description of Unknown: RightRegion for integrase B8811 sequence
tctgttataaaagaaattcaaattgacgatcgtagaaatttaaaggtcatttttttatgactttttttgtagtagtaactatgagcagcctgttggctcgtctgccagaatcagagaaggacgggtaatcaatgcgcggcca

SEQ ID NO: 34811 - DNA, 146 bp, Unknown
  Description of Unknown: RightRegion for integrase B8812 sequence
tctgttataaaagaaattcaaattgacgatcgtagaaatttaaaggtcatttttttatgactttttttgtagtagtaactatgagcagcctgtcggctcgtcggccagcacaatagccggtttggtaatcagggcgcgggcaatcg

SEQ ID NO: 34812 - DNA, 92 bp, Unknown
  Description of Unknown: RightRegion for integrase B8813 sequence
cgcaccatcagaaggattgaaattgatggtaagaaggttactaaggtattttttgtataatttttttatcctttttgttgctattatgtcac

SEQ ID NO: 34813 - DNA, 260 bp, Unknown
  Description of Unknown: RightRegion for integrase B8814 sequence
gaacgtataatagaaagaattgtgatccgtgataaagacgtggagatttatttcaaataaacgtttatagtgaaaggctattctattattctttcgaatgataaaatagccttttttcgagtgcgttacttgatttaaaatcaaggcgattgtatattatatatagagagggatacaagaaaggagctgaaagaaatgaataagaagtttgaagcattggttttagtaaacggcaagacactaaccgagttcaaagggaa

SEQ ID NO: 34814 - DNA, 260 bp, Unknown
  Description of Unknown: RightRegion for integrase B8815 sequence
tctgttataaaagaaattcaaattgacgatcgtagaaatttaaaggtcatttttttatgacttttttgtagtagtaactatgagcagcctgttggttcatcagccagaataatggcgggcttcgccgcaagtgccctagcaatcgcagccctctgctgctgtccaccggataatgttccaggaagagcttccctcttctctgacagccctaaaagttccagtatcccatccacatactccacatcaacctttctcccatc

SEQ ID NO: 34815 - DNA, 260 bp, Unknown
  Description of Unknown: RightRegion for integrase B8816 sequence
cgtactatcaggcgtattgagatcgatggaaagaaggtgtctaaggtgttttttatataatttttttattctttttgttgctattatgtcaccttgccacttgtaatagtaacataatagcaactaattaaataatatcaatatatcacacaatgtatgatatttttatcactatacaagtcacacattgtgtgatattatatagacataacaaagaaaggaactaccaaaggtagtaaggtaaaatgaaatgagaaacg

SEQ ID NO: 34816 - DNA, 260 bp, Unknown
  Description of Unknown: RightRegion for integrase B8817 sequence
tctgttataaaagaaattcaaattgacgatcgtagaaatttaaaggtcatttttttatgacttttttgtagtagtaactatgagcagcctgtcggctcgtcggccagcacaatagccggtttggtaatcagggcgcgtgcgatagccacacgctgctgctgtccgccggaaagattgttgggcatatttttcagtttatcttccaaccccagcaggtgaacgatctcgtccaaaaacttctgatccaccgtgtccccgtc

SEQ ID NO: 34817 - DNA, 260 bp, Unknown
  Description of Unknown: RightRegion for integrase B8818 sequence
tgcattgagaaagttgtgattagtggtaacgatttggagatacgttttatcacattttgatagatttcaacttacctacagtaagcccaatgatatcaggtgaaatccggagatttttgcgggatgacggcatgattaaggtaagccgttctttaaaagaactggcaggaaaagtatttcttgtaaaagaagaattatcggactgttatggacgggatccaaccgtagaagagattgcagggaagcttggggtaagcagt

SEQ ID NO: 34818 - DNA, 260 bp, Unknown
  Description of Unknown: RightRegion for integrase B8819 sequence
gcgcgtgaactggcgctccggcaggccgcagaaaggaggcttgccaaatgccagcagtaacagcgacgcgggtaacgattatccctgcaaagaaagaccggcttcccatcaatgtactgagcagcgaggcccgcaagctgcgggtggcagcctatgctcgtgtatccaccaacaatgaggagcagcttaccagctatgaggcgcaggtggactattatacccggtacattcaatctaaggacgagtggcagtttgtagag

SEQ ID NO: 34819 - DNA, 260 bp, Unknown
  Description of Unknown: RightRegion for integrase B8820 sequence
tctgttataaaagaaattcaaattgacgatcgtagaaatttaaaggtcatttttttatgactttttttgtagtagtaactatgagcagcctgtgggttgctatcagttactactactaatttataacactattttattaaatcagatagcaataagatctttccatgttgccggtccgcatactccatctacttccaaggctccgtttcttgatttctggtatgctttaagtgcataaatagtattgtccccagcttctc

SEQ ID NO: 34820 - DNA, 260 bp, Unknown
  Description of Unknown: RightRegion for integrase B8821 sequence
tcagtcattaaagaaatccagattgacgatcacaagaatttaaaggtcatttttttatgacctttttgtagtagtaaccgatagtaacctgtcggctcgtcggccagcacaatagccggtttggtaatcaaggcgcgggcaatcgccacacgctgctgctgtccgccggaaagattgttcggcatatttttcagtttatctttcagccccagcaggtgaacgatctcgtccaaaaacttctgatccaccgtgtccccgtc

SEQ ID NO: 34821 - DNA, 260 bp, Unknown
  Description of Unknown: RightRegion for integrase B8822 sequence
atagagcgaatggatgttccagtggaagatagttatcatgtaaagatacatttttgttaggtacgtttaattcatcaacaacacctgtcgccggcagtccaaaaatagattggaaggtacgcaccgcttccgctgtcaaaggtccataaataccatccacagccacacgcggaatcgccggataatcccctgcaatcacattcagatgttcctgcagctggctcaccttttttccttctgaacccacagacagttctcct

SEQ ID NO: 34822 - DNA, 251 bp, Unknown
  Description of Unknown: RightRegion for integrase B8823 sequence
tcagtcattaaagaaatccagattgacgatcacaagaatttaaaggtcatttttttatgacctttttgtagtagtaactaatagtaacctgtgggcaggacagccagcttaaaatgccaaatccagcaccgataggcagtacctttgcttcgtacacaaagctgatccggcagaactcccgcatggcgttgataacagttttattcttcaaaccacctacgccataggcccggaaagtttgaataccagac

SEQ ID NO: 34823 - DNA, 109 bp, Unknown
  Description of Unknown: RightRegion for integrase B8824 sequence
tcagtcattaaagaaatccagattgacgatcacaagaatttaaaggtcatttttttatgacctttttgtagtagtaactaatagtaacctgttctttatttggatagat

SEQ ID NO: 34824 - DNA, 260 bp, Unknown
  Description of Unknown: RightRegion for integrase B8825 sequence
cggttgcagaataggaggataaacgatgccgacagtaaaggtaataccagcgactcgtgattttcatacgggcatagaaaagacaacaacgcgaaagaagagggttggcgcgtatgccagggtttctactgatagcgatgatcagctttcgtcttatgaggcacagtgcgattattatacgaggtatatcaagagtcgtcccgattgggagtttgttggattgtatgccgacgaggggatttcgggtacaaacaccaagc

SEQ ID NO: 34825 - DNA, 134 bp, Unknown
  Description of Unknown: RightRegion for integrase B8826 sequence
tgtattgaaaagattattattacggatgatgatatagaaataagatttaatatcgaataattttctcctacggaatatcattccgatgattgtttataggagaaaacaccgaattggccacgtttttgcccgat

SEQ ID NO: 34826 - DNA, 260 bp, Unknown
  Description of Unknown: RightRegion for integrase B8827 sequence
tcagtcattaaagaaattcagattgacgatcacaaaaatttaaaggtcatttttttatgacctttttgtagtagtaactgatagtaacctgtgggttgctatcagttactactactaatttataacactattttattaaatcagatagcaataagatctttccatgttgccggtccgcatactccatctacttccaaggctccgtttcttgatttctggtatgctttaagagcataaatagtattgtccccagcttctct

SEQ ID NO: 34827 - DNA, 260 bp, Unknown
  Description of Unknown: RightRegion for integrase B8828 sequence
tgcgttgaaaagatagtcataactgatggcaatattgatattcattttaggattatttaagttttatttcttcttacgctgttcatcccgatgaacgcagtaaggggaaaacacaacatattgaccagaactctattcaaataacaatatattgtgaaaatattactatttgctgacggtttgaccgtctttttttatgcgaaaattcaaccataaggaggcggtcgaaatgttttcagatgctttattgacaaagatat

SEQ ID NO: 34828 - DNA, 141 bp, Unknown
  Description of Unknown: RightRegion for integrase B8829 sequence
tctgtcattaaagaaattcaaattgacgatcataagaatttaaagattatttttttatgacttttttatagtagtaactggtagtaacctgtcggctcatctgcaaatataatttccggacgattcaccagtgctcttgca

SEQ ID NO: 34829 - DNA, 91 bp, Unknown
  Description of Unknown: RightRegion for integrase B8830 sequence
tcagtcattaaagaaattcagattgacgatcacaaaaatttaaaggtcatttttttatgacctttttgtagtagcaactgatagtaacctg

SEQ ID NO: 34830 - DNA, 260 bp, Unknown
  Description of Unknown: RightRegion for integrase B8831 sequence
tcagtcattaaagaaattcagattgacgatcacaagaatttaaaggtcatttttttatgaccttttttgtagtagtaactgatagtaacctgttctttatttggatagatccttatttttactgcccggtttatctttctcaccctgactctctatatactgatggattgtttcaacaggtgctatatttcaaagatttcttttgttctctctgacatcttatcgtccagcatctttctgccatatttcataaccagaat

SEQ ID NO: 34831 - DNA, 260 bp, Unknown
  Description of Unknown: RightRegion for integrase B8832 sequence
tctgtcattaaagaaattcaaattgacgatcataagaatttaaagattatttttttatgacttttttatagtagtaactgatagtaacctgtgggttgctatcagttgctactactaatttataacactattttattaaatcagatagcaataagatctttccatgttgccggtccgcatactccatctacttccaaggctccgtttcttgatttctggtatgctttaagtgcataaatagtattgtccccagcttctct

SEQ ID NO: 34832 - DNA, 92 bp, Unknown
  Description of Unknown: RightRegion for integrase B8833 sequence
tctgtcattaaagaaattcaaattgacgatcataagaatttaaagattatttttttatgacttttttatagtagtaactggtagtaacctgt

SEQ ID NO: 34833 - DNA, 260 bp, Unknown
  Description of Unknown: RightRegion for integrase B8834 sequence
tcagtcattaaagaaattcagattgacgatcacaagaatttaaaggtcatttttttatgacctttttgtagtagtaactgatagtaacctgtgggttgctatcagttactactactaatttataacactattttattaaatcagatagcaataagatctttccatgttgccggtccgcatactccatctacttccaaggctccgtttcgtgatttctggtatgctttaagtgcataaatagtattgtccccagcttctct

SEQ ID NO: 34834 - DNA, 260 bp, Unknown
  Description of Unknown: RightRegion for integrase B8835 sequence
cggttgcagaataggaggataaacgatgccgacagtaaaggtaataccagcgactcgtgattttcatacgggcatagaaaagacaacaacgcgaaaaaagagggttggcgcgtatgccagggtttctactgatagcgatgatcagctttcgtcttatgaggcacaatgcgattattatacgaggtatatcaagagtcgtcccgattgggagttcgttggattgtatgccgacgaggggatttcgggtacaaacaccaagc

SEQ ID NO: 34835 - DNA, 144 bp, Unknown
  Description of Unknown: RightRegion for integrase B8836 sequence
tctgtcattaaagaaattcaaattgacgatcataagaatttaaagattatttttttatgacttttttatagtagtaactggtagtaacctgtcggctcatctgcaaatataatttccggacgattcaccagtgctcttgcaatt

SEQ ID NO: 34836 - DNA, 260 bp, Unknown
  Description of Unknown: RightRegion for integrase B8837 sequence
cggttgcagaataggaggataaacgatgccgacagtaaaggtaataccagcgactcgtgattttcatacgggcatagaaaagacaacaacgcgaaaaaagagggtgggcgcgtatgccagggtttctactgatagcgatgatcagctttcgtcttatgaggcacagtgcgattattatacgaggtatatcaagagtcgtcccgattgggagtttgttggattgtatgccgacgaggggatttcgggtacaaacaccaagc

SEQ ID NO: 34837 - DNA, 260 bp, Unknown
  Description of Unknown: RightRegion for integrase B8838 sequence
tctgtcattaaagaaattcaaattgacgatcataagaatttaaagattatttttttatgactttttttatagtagtaactgatagtaacctgtgggttgctatcagttactactactaatttataacactattttattaaatcagatagcaataagatctttccatgttgccggtccgcatactccatctacttccaaggctccgtttcttgatttctggtatgctttaagtgcataaatagtattgtccccagcttctc

SEQ ID NO: 34838 - DNA, 260 bp, Unknown
  Description of Unknown: RightRegion for integrase B8839 sequence
tctgtcattaaagaaattcaaattgacgatcataagaatttaaagattatttttttatgacttttttatagtagtaactggtagtaacctgtgggttgccatcagttactactactaatttataacactattttattaaatcagatagcaataagatctttccatgttgccggtccgcatactccatctacttccaaggctccatttcttgatttctggtatgctttaagagcataaatagtattgtccccagcttctct

SEQ ID NO: 34839 - DNA, 143 bp, Unknown
  Description of Unknown: RightRegion for integrase B8840 sequence
tcagtcattaaagaaatccagattgacgatcacaagaatttaaaggtcatttttttatgacctttttgtagtagtaactgatagtaacctgttctttatttggatagatccttatttttactgcccggtttatctttctcacc

SEQ ID NO: 34840 - DNA, 260 bp, Unknown
  Description of Unknown: RightRegion for integrase B8841 sequence
tgcattgataaaatcttaatctatagagataatatagaaattcatttcattacaaattaagtcttttctaccatatacatatcataggagcgattagtcgatggtagaaaattaaaaaatacgttgaccggatttgctcaaaataacgtaaaaacgtatcgtacagaatattgataataataactattattagtataaaatagcagtgactgataaatgacggaaccttgacggtttttcgtcttttttttatgtgaaaa

SEQ ID NO: 34841 - DNA, 260 bp, Unknown
  Description of Unknown: RightRegion for integrase B8842 sequence
tgtgtggaaaaagtagtcataactgatggtgacatcgacattcattttaatatttcttaattttttctccttacgaacttcattccgatgattgcagtaaggggaaaacacaacatattgaccggaactctattcgaataacaatatattgtggaaatattactatttgctgacggtttgaccgtctttttttatgcgaaaattcaaccataaggaggcggtcgaaatgttttcagatgctttattaacaaagatatttt

SEQ ID NO: 34842 - DNA, 241 bp, Unknown
  Description of Unknown: RightRegion for integrase B8843 sequence
tcagtcattaaagaaatccagattgacgatcacaagaatttaaaggtcatttttttatgacctttttgtagtagtaactgatagtaacctgtcggctcgtcggccagcacaatagccggtttggtaatcaaggcgcgtgcgatagccacacgctgctgctgtccgccggaaagattgttcggcatgtttttcagtttatcttccagccccagcagatgaacgatctcgtccaaaaacttct

SEQ ID NO: 34843 - DNA, 260 bp, Unknown
  Description of Unknown: RightRegion for integrase B8844 sequence
agagtcgtgaggagaatcgagatcaagcgtcactcggtcgacaaggtgtactttgtttaaatttttgtgcaattttttattacttattttttgctattatgtaaccttgtcacttgtcatggtaacataatagtaaaaaatatcaataaaaagcactgatttagtgcaaatatatactttacaaagtactgaatcggtgctatactatagtcataacaaagaaaggaactgccaaaggtagtaaagtaaagagaaatgaa

SEQ ID NO: 34844 - DNA, 143 bp, Unknown
  Description of Unknown: RightRegion for integrase B8845 sequence
tcagtcattaaagaaattcagattgacgatcacaaaaatttaaaggtcatttttttatgacctttttgtagtagtaactgatagtaacctgttctttatttggatagatccttatttttactgcccggtttatctttctcacc

SEQ ID NO: 34845 - DNA, 139 bp, Unknown
  Description of Unknown: RightRegion for integrase B8846 sequence
tgtgtggaaaaagtagtcataactgatggtgacatcgacattcattttaatatttcttaattttttctccttacgaacttcatcccgatgaacgcagtaaggggaaaacacaacatattgaccagaactctattcaaat

SEQ ID NO: 34846 - DNA, 141 bp, Unknown
  Description of Unknown: RightRegion for integrase B8847 sequence
tctgtcattaaagaaattcaaattgacgatcataagaatttaaagattatttttttatgacttttttatagtagtaactgatagtaacctgtcggctcatctgcaaatataatttccggacgattcaccagtgctcttgca

SEQ ID NO: 34847 - DNA, 260 bp, Unknown
  Description of Unknown: RightRegion for integrase B8848 sequence
tcagtcattaaagaaattcagattgacgatcacaaaaatttaaaggtcatttttttatgacctttttgtagtagtaactgatagtaacctgtagtaagccatgctacaccaacatatgccgcttcatcttctgatccatatacgatttcatttttttccttgtttacggtatgtccgaacatctgctcatctgcttcaatcggtattgttgatgtatttaagataacatctgcgtatcgaaattccttgtcatactctgc

SEQ ID NO: 34848 - DNA, 260 bp, Unknown
  Description of Unknown: RightRegion for integrase B8849 sequence
tcagtcattaaagaaatccagattgacgatcacaagaatttaaaggtcatttttttatgacctttttgtagtagtaactgatagtaacctgttctttatttggatagatccttatttttactgcccggtttatctttctcaccctgactctctatatactgatggattgtttcaacaggtgctatatttcaaagatttcttttgttctctctgacatcttatcgtccagcatctttctgctatatttcataaccagaatc

SEQ ID NO: 34849 - DNA, 260 bp, Unknown
  Description of Unknown: RightRegion for integrase B8850 sequence
tcagtcattaaagaaatccagattgacgatcacaagaatttaaaggtcatttttttatgacctttttgtagtagtaactgatagtaacctgttctttatttggatagatccttatttttactgcccggtttatctttctcaccctgactctctatatactgatggattgtttcaacaggtgctatatttcaaagatttcttttgttctctctgacatcttatcgtccagcatctttctgccatatttcataaccagaatc

SEQ ID NO: 34850 - DNA, 142 bp, Unknown
  Description of Unknown: RightRegion for integrase B8851 sequence
tcagtcattaaagaaattcagattgacgatcacaaaaatttaaaggtcatttttttatgacctttttgtagtagtaactgatagtaacctgttctttatttggatagatccttatttttactgcccggtttatctttctcac

SEQ ID NO: 34851 - DNA, 260 bp, Unknown
  Description of Unknown: RightRegion for integrase B8852 sequence
tcagtcattaaagaaatccagattgacgatcacaagaatttaaaggtcatttttttatgacctttttgtagtagtaactaatagtaacctgttctttatttggatagattcttatttttactgcccggtttatctttctcaccctgactctctatatactgatggattgtttcaacaggtgctatatttcaaagatttcttttgttctctctgacatcttatcgtccagcatctttctgctatatttcataaccagaatc

SEQ ID NO: 34852 - DNA, 260 bp, Unknown
  Description of Unknown: RightRegion for integrase B8853 sequence
tgcattgataaaatcttaatctatagagataatatagaaattcatttcattacaaattaagtcttttctaccatatacatatcataggagcgattagtcgatggtagaaaattaaaaaatacgttgaccggatttgctcaaaataacgtaaaaacgtatcgtacagaatattgataataataactattatcagtataaaatagcagtgactgataaatgacggaaccttgacggtttttcgtcttttttttatgtgaaaa

SEQ ID NO: 34853 - DNA, 260 bp, Unknown
  Description of Unknown: RightRegion for integrase B8854 sequence
cgcacgattaagcgacttgaggcggataataacggcgcgtttttcgtaacgcctgtttagttatattttaccttggcgttccctacattaaaatataactaaccccccggcatttgccgaggggttaagtttagctttccaatttccgcatgacgctattataaacccgctcgtttaccactttcaagctgtccatcagctcgtccatgacctcccacgcacgggttgggtcaacgttagataccgcccgaaggaaatcg

SEQ ID NO: 34854 - DNA, 260 bp, Unknown; identical to SEQ ID NO: 34848
  Description of Unknown: RightRegion for integrase B8855 sequence

SEQ ID NO: 34855 - DNA, 143 bp, Unknown; identical to SEQ ID NO: 34839
  Description of Unknown: RightRegion for integrase B8856 sequence

SEQ ID NO: 34856 - DNA, 260 bp, Unknown
  Description of Unknown: RightRegion for integrase B8857 sequence
tcagtcattaaagaaatccagattgacgatcacaagaatttaaaggtcatttttttatgacctttttgtagtagtaactgatagtaacctgttggttattcatagttactactacaaatattttataatattcctctttacataccactcattgagtggtattataatatcagaaacaaataagaacataaagtcaaggaggaaatagaaatgaagaaatacaatttatcaaaaatcatgaaaagagcatgggaactggt

SEQ ID NO: 34857 - DNA, 260 bp, Unknown; identical to SEQ ID NO: 34849
  Description of Unknown: RightRegion for integrase B8858 sequence

SEQ ID NO: 34858 - DNA, 260 bp, Unknown
  Description of Unknown: RightRegion for integrase B8859 sequence
tctgtcattaaagaaattcaaattgacgatcataagaatttaaagattatttttttatgacttttttatagtagtaactggtagtaacctgttggttattcacagttactactaaatacagctcctgattatttcaggagctttttgtttatcaaattgcaatcagatctttccatgttgctggtccgcatactccatcaacttcaagggctccatttctgtctttctggtatgctttaagtgcatagatcgtattgtcc

SEQ ID NO: 34859 - DNA, 260 bp, Unknown
  Description of Unknown: RightRegion for integrase B8860 sequence
tgcgttgaaaagatagtcataactgatgacaatattgatattcattttaggattatttaagttttatttcttcttacgctgttcatccctatgattattggggaaatccggagatacctgcgggacaacagtacgatccgggtcagccggtcactgcgggacacggcttacaaagcgatctatgcccgggaaaattatctgaaaaacaatctccgagaaccgacgattatggagattgcatcggaaatcgggatggaaaa

SEQ ID NO: 34860 - DNA, 260 bp, Unknown
  Description of Unknown: RightRegion for integrase B8861 sequence
tgtgtggaaaaagtagtcataactgatggtgacatcgacattcattttaatatttcttaattttttctccttacgaacttcatcccgatgaacgcggtaaggagaaaacacaacatattgaccagaactctattcaaataacaatatattgtgaaaatattactatttgctgacggtttgaccgtctttttttatgcgaaaattcaaccataaggaggcggtcgaaatgttttcagatgctttattaacaaagatatttt

SEQ ID NO: 34861 - DNA, 260 bp, Unknown
  Description of Unknown: RightRegion for integrase B8862 sequence
tcagtcattaaagaaatccagattgacgatcacaagaatttaaaggtcatttttttatgacctttttgtagtagtaactgatagtaacctgttggctcgtctgccagaatcagagaaggacgggtaatcaatgcgcggccaatcgccactctctgctgttgaccgccggaaagctgactgggtaaatgattacgacgatctttcaaattcaaaaccgtcagcagttcctccaaatatctcttatccggcttttgataatc

SEQ ID NO: 34862 - DNA, 260 bp, Unknown
  Description of Unknown: RightRegion for integrase B8863 sequence
tcagtcattaaagaaatccagattgacgatcacaagaatttaaaggtcatttttttatgacctttttgtagtagtaactgatagtaacctgttctttatttggatagatccttatttttacggcgcggttcattcttctcaccctggctttctatatactgccgtatcgtttcaatcgttgctccacctgcactgagcaggccgaagatctgaccccagaatgcatctttcatggtctaactccattatatttatcgtcc

SEQ ID NO: 34863 - DNA, 164 bp, Unknown
  Description of Unknown: RightRegion for integrase B8864 sequence
tcagtcattaaagaaattcagattgacgatcacaagaatttaaaggtcatttttttatgacctttttgtagtagtaactgatagtaacctgttctttatttggatagatccttatttttactgcccggtttatctttctcaccctgactctctatatactgatg

SEQ ID NO: 34864 - DNA, 260 bp, Unknown
  Description of Unknown: RightRegion for integrase B8865 sequence
tcagttattaaagaaatccagattgacgatcacaagaatttaaaggtcatttttttatgacctttttgtagtagtaactgatagtaacctgttctttatttggatagatccttatttttactgcccggtttatctttctcaccctgactctctatatactgatggattgtttcaacaggtgctatatttcaaagatttcttttgttctctctgacatcttatcgtccagcatctttctgctatatttcataaccagaatc

SEQ ID NO: 34865 - DNA, 260 bp, Unknown
  Description of Unknown: RightRegion for integrase B8866 sequence
tcagtcattaaagaaatccagattgacgattacaagaatttaaaggtcatttttttatgacctttttgtagtagtaactgatagtaacctgttctttatttggatagatccttatttttactgcccggtttatctttctcaccctgactctctatatactgatggattgtttcaacaggtgctatatttcaaagatttcttttgttctctctgacatcttatcgtccagcatctttctgctatatttcataaccagaatc

SEQ ID NO: 34866 - DNA, 260 bp, Unknown
  Description of Unknown: RightRegion for integrase B8867 sequence
tgcgttgaaaagatagtcataactgatggaaatattgatattcattttaggattatttaagttttatttcttcttacgctgttcatcccgatgaacgcagtaaggggaaaacacaacatattgaccagaactctattcaaataacaatatattgtgaaaatattactatttgctgacggtttgaccgtctttttttatgcgaaaattcaaccataaggaggcggtcgaaatgttttcagatgctttattgacaaagatat

SEQ ID NO: 34867 - DNA, 260 bp, Unknown
  Description of Unknown: RightRegion for integrase B8868 sequence
tcagtcattaaagaaattcagattgacgatcacaaaaatttaaaggtcatttttttatgacctttttgtagtagtaactgatagtaacctgttctttatttggataaatccttatttttactgcccggtttatctttctcaccctgactttctatatactgatggattgttccaacaggtgctatatttcaaagatttcttttgctctctctaacattttatcgtccagcatctttctgctatatttcataaccatgatc

SEQ ID NO: 34868 - DNA, 260 bp, Unknown
  Description of Unknown: RightRegion for integrase B8869 sequence
atagaacgaattgatgttccagtgaaagatagttatcacatcaagatacatttctgttaggttcgattaacacatcaacaacacctgtcgccggcagtccaaaaatagattggaaggtacgcaccgcttccgctgtcaaaggtccataaataccatccacagccacacgcggaatcgccggataatcccctgcaatcacattcagatgttcctgtaactggctcaccttttttccttctgaacccacggacagttctcct

SEQ ID NO: 34869 - DNA, 260 bp, Unknown
  Description of Unknown: RightRegion for integrase B8870 sequence
tctgtcattaaagaaattcaaattgacgatcataagaatttaaagattatttttttatgacttttttatagtagtaactgatagtaacctgtgggttgctatcagttactactactaatttataacactattttattaaatcagatagcaataagatctttccatgttgccggtccgcatactccatctacttccaaggctccgtttcttgatttctggtatgctttaagtgcataaatagtattgtccccagcttctct

SEQ ID NO: 34870 - DNA, 142 bp, Unknown
  Description of Unknown: RightRegion for integrase B8871 sequence
tctgtcattaaagaaattcaaattgacgatcataagaatttaaagattatttttttatgacttttttatagtagtaactggtagtaacctgtcggctcatctgcaaatataatttccggacgattcaccagtgctcttgcaa

SEQ ID NO: 34871 - DNA, 260 bp, Unknown
  Description of Unknown: RightRegion for integrase B8872 sequence
tcagtcattaaagaaatccagattgacgatcacaagaatttaaaggtcatttttttatgacctttttgtagtagtaactgatagtaacctgtgggttgctatcagttactactactaatttataacactattttattaaatcagatagcaataagatctttccatgttgccggtccgcatactccatctacttccaaggctccgtttcttgatttctggtatgctttaagagcataaatagtattgttcccagcttctct

SEQ ID NO: 34872 - DNA, 260 bp, Unknown
  Description of Unknown: RightRegion for integrase B8873 sequence
tcagtcattaaagaaatccagattgacgatcacaagaatttaaaggtcatttttttatgacctttttgtagtagtaactgatagtaacctgttctttatttggatagatccttatttttactgcccgatttatctttctcaccctgactctctatatactgatggattgtttcaacaggtgctatatttcaaagatttcttttgttctctctgacatcttatcgtccagcatctttctgctacatttcataaccatgatc

SEQ ID NO: 34873 - DNA, 109 bp, Unknown
  Description of Unknown: RightRegion for integrase B8874 sequence
atagagcgaatggatgttccagtggaagatagttatcatgtaaagatacatttttgttaggtacgtttaattcatcaacaacacctgtcgccggcagtccaaaaataga

SEQ ID NO: 34874 - DNA, 260 bp, Unknown
  Description of Unknown: RightRegion for integrase B8875 sequence
tcagtcattaaagaaatccagattgacgatcacaagaatttaaaggtcatttttttatgacctttttgtagtagtaactgatagtaacctgtcggttcatcagcaaggataatcgcaggcttcgtaattaaagctcgtgcaatcgctacacgttgctgttgaccgcctgaaagattgttcggcatattttccagtttatcttctaaagccaacatatacacaacttcgtccataaatttctggtctactgtatcgccatc

SEQ ID NO: 34875 - DNA, 260 bp, Unknown
  Description of Unknown: RightRegion for integrase B8876 sequence
tcagtcattaaagaaatccagattgacgatcacaagaatttaaaggtcatttttttatgacctttttgtagtagtaactgatagtaacctgtgggttgctatcagttactactactaatttataacgctattttattaaatcagatagcaataagatctttccatgttgccggtccgcatactccatctacttccaaggctccgtttcttgatttctggtatgctttaagtgcataaatagtattgtccccagcttctct

SEQ ID NO: 34876 - DNA, 260 bp, Unknown
  Description of Unknown: RightRegion for integrase B8877 sequence
tcagtcattaaagaaatccagattgacgatcacaagaatttaaaggtcatttttttatgacctttttgtagtagtaactaatagtaacctgttggttattcacagttactactactaaatacagctcctgattatttcaggagctttttgtttatcaaattgcaatcaggtctttccatgttgctggtccgcatactccatcaacttcaagggctccatttctgtctttctggtatgctttaagtgcatagatcgtattg

SEQ ID NO: 34877 - DNA, 260 bp, Unknown; identical to SEQ ID NO: 34848
  Description of Unknown: RightRegion for integrase B8878 sequence

SEQ ID NO: 34878 - DNA, 260 bp, Unknown
  Description of Unknown: RightRegion for integrase B8879 sequence
cgcacgattaagcgacttgaggcggataataacggcgcgtttttcgtaacgcctgtttagttatattttaccttggcgttccatacgttaaaatataactaaccccccggcatttgccgaggggttaagtttagctttccaatttccgcatgacgctattataaacccgctcgtttaccactttcaagctgtccatcagctcgtccatgacctcccacgcacgggttgggtcaacgttagataccgcccggaggaaatcg

SEQ ID NO: 34879 - DNA, 131 bp, Unknown
  Description of Unknown: RightRegion for integrase B8880 sequence
tctgtcattaaagaaattcaaattgacgatcataagaatttaaagattatttttttatgacttttttatagtagtaactgatagtaacctgtcggctcatctgcaaatataatttccggacgattcaccag

SEQ ID NO: 34880 - DNA, 260 bp, Unknown
  Description of Unknown: RightRegion for integrase B8881 sequence
attatcaaagaaatcaaaatttaccctgataggcacatagaatattccttaaatgtttgaaaaatttttaatgaattttattacttaatatttctccctctgtagttgcagtaatattatgtaatataatccccgccctcatgagagagcggggactatcatcagtgcttcacgacaaactcatagtaccgagcaagcttgtcgggagcggcgtcctgatcatccagaaacgctttcgcaatttcggcatagaagtcgat

SEQ ID NO: 34881 - DNA, 260 bp, Unknown
  Description of Unknown: RightRegion for integrase B8882 sequence
cgcacaatccagcgcatcgacgcagacaatgacggtgcgttttttgtaacgccaagttagtcttattttcatgtcgcaacgctaacgttaaaatataactaaccccccgacatttgccgaggggttaagtttagctttccaatttccgcatgacgctattgtaaacccgctcgtttatcacctgcaagctgtccatcagctcgtccatgacctcccacgcacgggctgggtcaacgttagacaccgcccgaaggaaatcg

SEQ ID NO: 34882 - DNA, 260 bp, Unknown
  Description of Unknown: RightRegion for integrase B8883 sequence
ataaaagaaatttatttgaatgaagcctttgaaattactggctttatattttatatctaggacttgtactaaataactatttcctagaggttaacatcaattagtacaagtctattaaaaagggcgattagaaattctaaccgccatttattttacgcttttacaatcgcagcgtcaaatcctgctgctttcaatttttcctgcaaggaaatagcatttgctttgttgcgatacgctccgacctgtacacgataaataga

SEQ ID NO: 34883 - DNA, 260 bp, Unknown
  Description of Unknown: RightRegion for integrase B8884 sequence
cgcacgatccagcgcatcgacgcagacaatgacggtgcgttttttgtaacgccaagttagtcttattttcatgtcgcaacactaactgtatatccgaaatatttttgcaaggtctccagatcgccccggtcccaggctacctcgatggcgtggcggatggcccgttccacccgggaaggcgttgtggcaaaccgcttggccacttcgggatagagaaccttcgtcaccgcgttgatgacatccatatcccgcaccgtgat

SEQ ID NO: 34884 - DNA, 260 bp, Unknown
  Description of Unknown: RightRegion for integrase B8885 sequence
ataaaagaaatttatttgaatgaagcctttgaaattactggctttatattttatatctaggacttgtactaaataactatttcctagaggttaacatcaattagtacaagtctattaaaaagggcgattagaaattctaaccgccctttattttacgcttttacaatcgcagcgtcaaatcctgccgatttcaatttttcctgcaaggcaatagcatttgctttattgcgatacgctccgacctgtacacgataaataga

SEQ ID NO: 34885 - DNA, 260 bp, Unknown; identical to SEQ ID NO: 34884
  Description of Unknown: RightRegion for integrase B8886 sequence

SEQ ID NO: 34886 - DNA, 260 bp, Unknown
  Description of Unknown: RightRegion for integrase B8887 sequence
cgcacaatccagcgcatcgacgcagacaatgacggtgcgttttttgtaacgccaagttagtcttattttcatgttgcaacactaacattaaaatataactaacccctcggcatttgtcgaggggttaagtttagctttccaatttccgcatgacgctattgtaaacccgcgcatttaccactttcaagctgtccatcaactcgtccatgacctcccacgcacgggctgggtcaacgttagacaccgcccggaggaattcg

SEQ ID NO: 34887 - DNA, 260 bp, Unknown
  Description of Unknown: RightRegion for integrase B8888 sequence
ataaaagaaatttatttgaatgaagcctttgaaattactggctttatattttatatctagggcttgtactaaataactatttcctagaggttaacattaattagtacaagtctattaaaaatggcgattagaaattctaaccgccatttattttacgcttttacaatcgcagcatcaaatcctgctgctttcaatttttcctgcaaggcaatagcatttgctttgttgcgatacgctccgacctgtacacgataaataga

SEQ ID NO: 34888 - DNA, 260 bp, Unknown
  Description of Unknown: RightRegion for integrase B8889 sequence
attgtcaaagaaatcaaaatataccctgataggcacatagaatattccttaaatgtgtgaaaaaaatttccaaaagtttattacttaatattacttcctctgtggatgagcttaaatagatgataggcatgatgctcctcccttcctgcctcattctatggtatcctccgtgaaaatgtgatatactcagcctgtcagaatcgatcacgtgccattttcccacagggcatttcttacatgttctaaatctctgcccttcc

SEQ ID NO: 34889 - DNA, 260 bp, Unknown
  Description of Unknown: RightRegion for integrase B8890 sequence
cgcacaatccagcgcatcgacgcagacaatgacggtgcgttttttgtaacgcccagttagtcttattttcatgtcgcaacgctaacgttaaaatataactaaccccccggcatttgccgaggggttaagtttagctttccaatttccgcatgacgctattataaacccgctcgttgaccactttcaagctgtccatcagctcgtccatgacctcccacgcacgggctgggtcaacgttagacaccgcccgaaggaaatcg

SEQ ID NO: 34890 - DNA, 260 bp, Unknown
  Description of Unknown: RightRegion for integrase B8891 sequence
cgcacgatccagcgcatcgacgcagacaatgacggtgcgttttttgtaacgcctagttagtcttattttcatgtcacaacgcctacgtcaaaatataactaaccccccggcatttgccgagggggttaagtttagctttccaatttccgcatgacgctattataaacccgctcgttgaccactttcaagctgtccatcagctcgtccatgacctcccacgcacgggctgggtcaacgttagacaccgcccggaggaaatc

SEQ ID NO: 34891 - DNA, 260 bp, Unknown
  Description of Unknown: RightRegion for integrase B8892 sequence
cgcacaatccagcgcatcgacgcagacaatgacggtgcgttttttgtaacgccaagttagtcttattttcatgtcgcaacacctacattaaaatataactaaccccccggcatttgccgagggggttaagtttagttttccaatttccgcatgacgctattataaacccgctcgttgaccactttcaagctgtccatcagctcgtccatgacctcccacgcacgggctgggtcaacgttagacaccgcccggaggaaatc

SEQ ID NO: 34892 - DNA, 260 bp, Unknown
  Description of Unknown: RightRegion for integrase B8893 sequence
cgcacaatccagcgcatcgacgcagacaatgacggtgcgttttttgtaacgccaagttagttttattttcacgtcgcaacactaacattaaaatataactaaccccccggcatttgccgaggggttaaatttagctttccaatttccgcatgacgctattgtaaacccgctcgttgaccactttcaagctgtccatcagctcgtccataacctcccacgcacgggctgggtcaacgttagacaccgcccggaggaaatcg

SEQ ID NO: 34893 - DNA, 260 bp, Unknown
  Description of Unknown: RightRegion for integrase B8894 sequence
cgcacaatccagcgcatcgacgcagacaatgacggtgcgttttttgtaacgccaagttagtcttattttcacgtcgcaacgctaacgttaaaatataactaaccccccggcatttgccgaggggttaagtttagctttccaatttccgcatgacgctattgtaaacccgctcgtttatcacctgcaagctgtccatcagctcgtccatgacctcccacgcacgggctgggtcaacgttggacaccgcccgaaggaaatcg

SEQ ID NO: 34894 - DNA, 260 bp, Unknown
  Description of Unknown: RightRegion for integrase B8895 sequence
ataaaagaaatttatttgaatgaagcctttgaaattactggctttatattttatatctaggacttgtactaaataactatttcctagaggttaacatcaattagtacaagtctattaaaaagggcgattagaaattctaaccgccctttattttacgcttttacaatcgcagcatcaaatcctgctgctttcaatttttcctgcaaggcaatagcatttgctttgttgcgatacgctccgacctgtacacgataaataga

SEQ ID NO: 34895 - DNA, 260 bp, Unknown
  Description of Unknown: RightRegion for integrase B8896 sequence
ataaaagaaatttatttgaatgaagcctttgaaattactggctttatattttatatctaggacttgtactaaataactatttcctagcggttaacattaattagtacaagtctattaaaaatggcgattagaaattctaaccgccatttattttacgcttttacaatcgcagcgtcaaatcctgctgctttcaatttttcctgcaaggaaatagcatttgctttgttgcgatacgctccgacctgtacacgataaataga

SEQ ID NO: 34896 - DNA, 260 bp, Unknown
  Description of Unknown: RightRegion for integrase B8897 sequence
ataaaagaaatttatttgaatgaagcctttgaaattactggctttatattttatatctaggacttgtactaaataactatttcctaaaggttaacatcaattagtacaagtctattaaaaagggcgattagaaattctaaccgccctttattttacgcttttacaatcgcagcgtcaaatcctgccgatttcaatttttcctgcaaggcaatagcatttgctttattgcgatacgctccgacctgtacacgataaataga

SEQ ID NO: 34897 - DNA, 260 bp, Unknown
  Description of Unknown: RightRegion for integrase B8898 sequence
ataaaagaaatttatttgaatgaagcctttgaaattactggctttatattttatatctaggacttgtactaaacagctatttcctagcggttaacattaattagtacaagtctattaaaaagggcgattagaaattctaaccgccctttgttttacgcttttacaatcgcagcatcaaatcctgctgctttcaatttttcctgcaaggcaatagcatttgctttgttgcgatacgctccgacctgtacacgataaataga

SEQ ID NO: 34898 - DNA, 260 bp, Unknown
  Description of Unknown: RightRegion for integrase B8899 sequence
cgcacaatccagcgcatcgacgcagacaatgacggtgcgttttttgtaacgccaagttagtcttattttcatgtcgcaacactaacattaaaatataactaaccccccggcatttgccgaggggttaaatttagttttccaatttccgcatgacgctattataaacccgctcgttgaccactttcaagctgtccatcagctcgtccatgacctcccacgcacgggctgggtcaacgttagacaccgcccggaggaaatcg

SEQ ID NO: 34899 - DNA, 260 bp, Unknown
  Description of Unknown: RightRegion for integrase B8900 sequence
ataaaagaaatttatttgaatgaagcctttgaaattactggctttatattttatatctaggacttgtactaaacatctatttcctagtggttaacattaattagtacaagtctattaaatcgaactataatgaatgcattattatcaaacctaggttttactgtaaccattgattttactgtgttttgagcattttttatttgcttataaaatggcaaatttgccatagaagtatataaaaatgcaacacgaaattgaac

SEQ ID NO: 34900 - DNA, 260 bp, Unknown
  Description of Unknown: RightRegion for integrase B8901 sequence
ataaaagaaatttatttgaatgaagcctttgaaattactggctttatattttatatctaggacttgtactaaataactatttcctagcggttaacattaattagtacaagtctattaaatcgaactataatgaatgcattcttatcaaacctaggttttactgtaaccattgattttactttgttttgagcattttttatttgcttataaagtggcaaatttgccatataagtatataaaatgaaacacgaaattgaacg

SEQ ID NO: 34901 - DNA, 86 bp, Unknown
  Description of Unknown: RightRegion for integrase B8902 sequence
ataaaagaaatttatttgaatgaagcctttgaaattactggctttatattttatatctaggacttgtactaaataactatttccta

SEQ ID NO: 34902 - DNA, 260 bp, Unknown
  Description of Unknown: RightRegion for integrase B8903 sequence
ataaaagaaatttatttgaatgaagcctttgaaattactggctttatattttatatctaggacttgtactaagtaactatttcctagaggttaacatcaattagtacaagtctattaaaaagggcgattagaaattctaaccgccatttattttacgcttttacaatcgcagcgtcaaatcctgctgctttcaatttttcctgcaaggaaatagcatttgctttgttgcgatacgctccgacctgtacacgataaataga

SEQ ID NO: 34903 - DNA, 260 bp, Unknown
  Description of Unknown: RightRegion for integrase B8904 sequence
ataaaagaaatttatttgaatgaagcctttgaaattagtggctttatattttatatctaggacttgtactaaataactgtttcctagcggttaacattaattagtacaagtctattaaaaatggcgattagaaattctaaccgccatttattttacgcttttacaatcgcagagtcaaatcctgctgctttcaatttttcctgcaaggcaatagcatttgctttattgtgatacgctccgacctgtacacgataaataga

SEQ ID NO: 34904 - DNA, 139 bp, Unknown
  Description of Unknown: RightRegion for integrase B8905 sequence
ataaaagaaatttatttgaatgaagcctttgaaattactggctttatattttatatctaggacttgtactaaataactatttcctagcggttaacattaattagtacaagtctattaaaaatggcgattagaaattcta

SEQ ID NO: 34905 - DNA, 260 bp, Unknown
  Description of Unknown: RightRegion for integrase B8906 sequence
cgcacaatccagcgcatcgacgcagacaatgacggtgcgttttttgtaacgccaagttagtcttattttcatgtcacaacactaacattaaaatataactaaccccccggcatttgccgagggggttaagtttagctttccaattttcgcatgacgctattataaacccgctcgttgaccactttcaagctgtccatcagctcgtccatgaccttccacgcacgggctgggtcaacgttagataccgcccggaggaaatc

SEQ ID NO: 34906 - DNA, 260 bp, Unknown
  Description of Unknown: RightRegion for integrase B8907 sequence
ataaaagaaatttatttgaatgaagcctttgaaattactggctttatattttatatctaagacttgtactaaataactatttcctagaggttaacattaattagtacaagtctattataaagggcgattagaaattctaaccgccctttattttacgcttttacaatcgcagcgtcaaatcctgccgatttcaatttttcctgcaaggcaatagcatttgctttattgcgatacgctccgacctgtacacgataaataga

SEQ ID NO: 34907 - DNA, 260 bp, Unknown
  Description of Unknown: RightRegion for integrase B8908 sequence
cgcacaatccagcgcatcgacgcagacaatgacggtgcgttttttgtaacgccaagttagttttattttcacgtcgcaacactaacattaaaatataactaaccccccggcatttgccgaggggttaaatttagctttccaatttccgcatgacgctattgtaaacccgctcgttgaccactttcaagctgtccatcagctcgtccataacctcccacgcacgggctgggtcaacgttagacaccgcccggaggaattcg

SEQ ID NO: 34908 - DNA, 260 bp, Unknown
  Description of Unknown: RightRegion for integrase B8909 sequence
cgcacaatccagcgcatcgacgcagacaatgacggtgcgttttttgtaacgccaagttagtcttattttcatgtcgcaacactaacattaaaatataactaaccccccggcatttgccgaggggttaaatttagctttccaatttccgcatgacgctattataaacccgctcgttgaccactttcaagctgtccatcagctcgtccatgacctcccacgcacgggctgggtcaacgttagacaccgcccggaggaaatcg

SEQ ID NO: 34909 - DNA, 139 bp, Unknown
  Description of Unknown: RightRegion for integrase B8910 sequence
ataaaagaaatttatttgaatgaagcctttgaaattactggctttatattttatatctaggacttgtactaaataactatttcctagcgggaatctgaattgtttttctgcgctggcaaaatgacttgaagtcatggtc

SEQ ID NO: 34910 - DNA, 260 bp, Unknown
  Description of Unknown: RightRegion for integrase B8911 sequence
gaggccatcaaacagatcaccataacccacgataaaataaacatagattttaatttatagaaaggttcgacgtagtacattcatccctatgatcattggcgaactgcgaaggtacctacgcgataacactgcactcagagtaagccgctcaatacgagatactgcatataaggcgctgaaaaaacgcacagagctgatggacgagctttcacgcgagcctaaactcggtgaaatagcaaaggcgcttgatatgaaagaag

SEQ ID NO: 34911 - DNA, 87 bp, Unknown
  Description of Unknown: RightRegion for integrase B8912 sequence
ataaaagaaatttatttgaatgaagcctttgaaattactggctttatattttatatctaggacttgtactaagtaactatttcctag

SEQ ID NO: 34912 - DNA, 260 bp, Unknown
  Description of Unknown: RightRegion for integrase B8913 sequence
ataaaagaaatttatttgaatgaagcctttgaaattactggctttatattttatatctaggacttgtactaaataactatttcctagtggttaacattaattagtacaagtatattaaaaatggcgattagaaattctaaccgccatttattttacgcttttacaatcgcagagtcaaatcctgctgctttcaatttttcctgcaaggaaatagcatttgctttgttgcgatacgctccgacctgtacacgataaataga

SEQ ID NO: 34913 - DNA, 260 bp, Unknown
  Description of Unknown: RightRegion for integrase B8914 sequence
ataaaagaaatttatttgaatgaagcctttgaaattactggctttatattttatatctaggacttgtactaagtaactattttctagaggttaacatcaattagtacaagtctattaaaaagggcgattagaaattctaaccgccctttattttacgcttttacaatcgcagcgtcaaatcctgccgatttcaatttttcctgcaaggaaatagcatttgctttgttgcgatacgctccgacctgtacacgataaataga

SEQ ID NO: 34914 - DNA, 260 bp, Unknown
  Description of Unknown: RightRegion for integrase B8915 sequence
cgcacaatccagcgcatcgacgcagacaatgacggtgcgttttttgtaacgccaagttagttttattttcatgtagcaacactaactgtatatccgaaatatttttgcaaggtctccagatcgccccggtcccaggctacctcgatggcgtggcggatggcccgctccacccgggaaggcgttgtggcgaaccgcttggccacttcgggatagaggaccttcgtcaccgcgttgatgacatccatatcccgcaccgtgat

SEQ ID NO: 34915 - DNA, 260 bp, Unknown
  Description of Unknown: RightRegion for integrase B8916 sequence
ataaaagaaatttatttgaatgaagcctttgaaattactggctttatattttatatctaggacttgtactaaataactatttcctagcggttaacattaattagtacaagtctattaaatcgaactataatgaatgcattattatcaaacctaggttttactgtaaccattgattttactgtgttttgagcattttttatttgcttataaaatggcaaatttgccattttataagcaaataaaaatgcaacacgaaattg

SEQ ID NO: 34916 - DNA, 260 bp, Unknown
  Description of Unknown: RightRegion for integrase B8917 sequence
ataaaagaaatttatttgaatgaagcctttgaaattactggctttatattttatatctaggacttgtactaaataactatttcctagtgggaaacattaattagtacaagtctattaaaaatggcgattagaaattctaaccgccatttattttacgcttttacaatcgcagcgtcaaatcctgccgatttcaatttttcctgcaaggcaatagcatttgctttattgcgatacgctccgacctgtacacgataaataga

SEQ ID NO: 34917 - DNA, 260 bp, Unknown
  Description of Unknown: RightRegion for integrase B8918 sequence
cgcacaatccagcgcatcgacgcagacaatgacggtgcgttttttgtaacgccaagttagttttattttcacgtcgcaacactaactgtatatccgaaatatttttgcaaggtctccaaatcgccccggtcccaggctacctcgatggcgtggcggatggcccgttccacccgggaaggcgttgtggcaaaccgcttggctacttcgggatagagaaccttcgtcaccgcgttgatgacatccatatcccgcaccgtgat

SEQ ID NO: 34918 - DNA, 260 bp, Unknown
  Description of Unknown: RightRegion for integrase B8919 sequence
ataaaagaaatttatttgaatgaagcctttgaaattactggctttatattttatatctaggacttgtactaagtaactatttcctagcgggaatctgaattgtttttctgcgctggcaaaatgacttgaggtcatggtcacgacgtgatccgcatagccggccgctacacacattgcaccgagagacagcgattccccacaggtactgcaggctccgtaaagtccaaagagcggtacctgaaaatccagcaccccaaacg

SEQ ID NO: 34919 - DNA, 260 bp, Unknown
  Description of Unknown: RightRegion for integrase B8920 sequence
ataaaagaaatttatttgaatgaagcctttgaaattactggctttatattttatatctaggacttgtactaaataactatttcctagcgggaatctgaattgtttttctgcgctggcaaaatgacttgaggtcatggtcacgacgtgatccgcatagccggccgctacacacattgcaccgagagacagcgattccccacaggtactgcaggctccgtaaagtccaaagagcggtacctgaaaatccagcaccccaaacg

SEQ ID NO: 34920 - DNA, 260 bp, Unknown
  Description of Unknown: RightRegion for integrase B8921 sequence
tcttttattgattacattgttgtaaatgactatgataatatcgatatttttttgcaataattatgttgcataatcagactatctcattgatgtatgcttctccatagtcaatgaaacagatatccccaacacgtatggacaatcccatttctatacagttattaaaatgtctacgtattcttaaattctgatcactgatcattcgtggaatagcttccttcacgggcaaagtctgataatcggcacttttctcttccaca

SEQ ID NO: 34921 - DNA, 260 bp, Unknown
  Description of Unknown: RightRegion for integrase B8922 sequence
cgcacaatccagcgcatcgacgcagacaatgacggtgcgttttttgtaacgccaagttagttttattttcatgtcgcaacactaacattaaaatataactaaccccccggcatttgccgaggggttaaatttagctttccaattttcgcatgacgctattgtaaacccgctcgtttatcacctgcaagctgtccatcagctcgtccatcacttcccacgcacgagccggatcaacgttggataccgcgcggagaaaatcg

SEQ ID NO: 34922 - DNA, 260 bp, Unknown
  Description of Unknown: RightRegion for integrase B8923 sequence
cgcacaatccagcgcatcgacgcagacaatgacggtgcgttttttgtaacgccaagttagtcttattttcatgtcgcaacactaacattaaaatataactaaccccccagcatttgccgaggggttaaatttagctttccaatttccgcatgacgctattgtaaacccgctcgttgaccactttcaagctgtccatcagctcgtccatgacctcccacgcacgggctgggtcaacgttagataccgcccggagaaattcg

SEQ ID NO: 34923 - DNA, 260 bp, Unknown
  Description of Unknown: RightRegion for integrase B8924 sequence
cgcacaatccagcgcatcgacgcagacaatgacggtgcgttttttgtaacgccaagttagtcttattttcatgtcgcaacacctacgttaaaatataactaaccccccggcatttgccgaggggttaagtttagctttccaatttccgcatgacgctattataaacccgctcgttgaccactttcaagctgtccatcagctcgtccatgacctcccacgcacgggctgggtcaacgttagacaccgcccggaggaattcg

SEQ ID NO: 34924 - DNA, 260 bp, Unknown
  Description of Unknown: RightRegion for integrase B8925 sequence
cgcacgatccagcgcatcgacgcagacaatgacggtgcgttttttgtaacgcctagttagtcttattttcacgtcacaacgcctacatcaaaatataactaaccccccggcatttgccgaggggtttaagtttagctttccaatttccgcatgacgctattataaacccgctcgttgaccactttcaagctgtccatcagctcgtccatgacctcccacgcacgggctgggtcaacgttagacaccgctcggaggaaatc

SEQ ID NO: 34925 - DNA, 260 bp, Unknown
  Description of Unknown: RightRegion for integrase B8926 sequence
cgcacaatccagcgcatcgacgcagacaatgacggtgcgttttttgtaacgccaagttagtcttattttcatgtcgcaacgctaacgttaaaatataactaaccccccggcatttgccgaggggttaagtttagctttccaatttccgcatgacgctattataaacccgctcgttgaccactttcaagctgtccatcagctcgtccatgacctcccacgcacgggctgggtcaacgttagacaccgcccggaggaaatcg

SEQ ID NO: 34926 - DNA, 183 bp, Unknown
  Description of Unknown: RightRegion for integrase B8927 sequence
cgcacaatccagcgcatcgacgcagacaatgacggtgcgttttttgtaacgccaagttagtcttattttcatgtcgcaacactaactgtatatccgaaatatttttgcaaggtctccagatcgccccgatcccaggctacctcgatggcgtggcggatggcccgttccacccgggaaggcgtt

SEQ ID NO: 34927 - DNA, 260 bp, Unknown
  Description of Unknown: RightRegion for integrase B8928 sequence
ataaaagaaatttatttgaatgaagcctttgaaattactggctttatattttatatctaggacttgtactaaataactatttcctaaaggttaacatcaattagtacaagtctattaaaaagggcgattagaaattctaaccgccatttattttacgcttttacaatcgcagcgtcaaatcctgctgctttcaatttttcctgcaaggaaatagcatttgctttgttgcgatacgctccgacctgtacacgataaataga

SEQ ID NO: 34928 - DNA, 260 bp, Unknown
  Description of Unknown: RightRegion for integrase B8929 sequence
ataaaagaaatttatttgaatgaagcctttgaaattactggctttatattttatatctaggacttgtactaaataactatttcctagaggttaacattaattagtacaagtatattaaaaaaggcgattagaaattctaaccgccctttattttacgctttcacaatggcaacttcaaatcctgctgctttcaatttatttttcatatacagttacatatttttctgatgctgtaatgtataatccagatttgagcctat

SEQ ID NO: 34929 - DNA, 260 bp, Unknown
  Description of Unknown: RightRegion for integrase B8930 sequence
ataaaagaaatttatttgaatgaagcctttgaaattactggctttatattttatatctaggacttgtactaaataactatttcctagtggttaatattaattagtacaagtatattaaaaagggcgattagaaattctaaccgccctttattttacgcttttacaatcgcagcatcaaatcctgctgctttcaatttttcctgcaaggcaatagcatttgctttgttgcgatacgctccgacctgtacacgataaataga

SEQ ID NO: 34930 - DNA, 260 bp, Unknown
  Description of Unknown: RightRegion for integrase B8931 sequence
atcataaaagaactgcacatctatcgtggcaccgttcaaggtccgcctatttttttataattaagtcgcagtaactatcatggatagaactcactggtatagtaactactactaaacttaatcccattctgaaataagaacaacccccggcgtaggaaagcacacctagccgggggtatctgttcatccgtttaacaggtcatacaactgcatcgcctgatactggctgtatccggcatctacgagggcggcaattttat

SEQ ID NO: 34931 - DNA, 260 bp, Unknown; identical to SEQ ID NO: 34920
  Description of Unknown: RightRegion for integrase B8932 sequence

SEQ ID NO: 34932 - DNA, 260 bp, Unknown
  Description of Unknown: RightRegion for integrase B8933 sequence
ataaaagaaatctatttgaatgaagcctttgaaattactggctttatattttatatctaggacttgtactaaataactatttcctagcgggaatctgaattgtttttctgcgctggcaaaatggcttgaagtcatggtcacgacgtgatccgcatagccggccgctacacacatcgcaccgagagacagcgattccccacaggtactgcaggctccgtaaagtccaaagagcggtacctgaaaatccagcaccccaaacg

SEQ ID NO: 34933 - DNA, 86 bp, Unknown; identical to SEQ ID NO: 34901
  Description of Unknown: RightRegion for integrase B8934 sequence

SEQ ID NO: 34934 - DNA, 260 bp, Unknown
  Description of Unknown: RightRegion for integrase B8935 sequence
ataaaagaaatttatttgaatgaagcctttgaaattactggctttatattttatatctagtacttgtactaaataactatttcctagcgggaatctgaattgtttttctgcgctggcaaaatggcttgaagtcatggtcacgacgtgatccgcatagccggccgctacacacatcgcaccgagagacagcgattccccacaggtactgcaggctccgtaaagtccaaagagcggtacctgaaaatccagcaccccaaacg

SEQ ID NO: 34935 - DNA, 109 bp, Unknown
  Description of Unknown: RightRegion for integrase B8936 sequence
attgtcaaagaaatcaaaatataccctgataggcacatagaatattccttaaatgtgtgaaaaaattttccaaaagtttattacttaatattacttcctctgtggatgg

SEQ ID NO: 34936 - DNA, 260 bp, Unknown
  Description of Unknown: RightRegion for integrase B8937 sequence
atcgaggttgaagggctttacccgaagcaagtcttttttatcggtcaggaaagactctaacgtacatgacagttctgtcacgttatttagaggctaccatccctataccatagtgaagtattttgcaaccttatacggtggtgcgtcctcgtcgttcaggaagtcctgtgccaagtcgaaatagaagtctggagagtcacctgcatatttctgtccagtatccttggagtcgttataatacatattcattgccagataaa

SEQ ID NO: 34937 - DNA, 260 bp, Unknown
  Description of Unknown: RightRegion for integrase B8938 sequence
ataaaagaaatttatttgaatgaagcctttgaaattactggctttatattttatatctaggacttgtactaagcaactatttcctagcgggaatctgaattgtttttctgcgctggcaaaatgacttgaagtcatggtcacgacgtgatccgcatagccggccgctacacacatcgcaccgagagacagcgattccccacaggtactgcaggctccgtaaagtccaaagagcggtacctgaaaatccagcaccccaaacg

SEQ ID NO: 34938 - DNA, 260 bp, Unknown
  Description of Unknown: RightRegion for integrase B8939 sequence
gaggctattaaacagataaccataacccacgataaaataaacatagatttcaatttatagggaggttcgacgtggtacattcatgccaactgatgtgccaagtcgaaaatatgaaaatgacaagaagggaagcacttttacgtgcaattaaatatgtcggggacaatgaccctgagcttacacataaactcaatgagatgatagaggatatgcctatgacgcattggagcgctgcggcgtgctatgatgcgatagaggat

SEQ ID NO: 34939 - DNA, 260 bp, Unknown
  Description of Unknown: RightRegion for integrase B8940 sequence
ataaaagaaatttatttgaatgaagcctttgaaattactggctttatattttatatctaggacttgtactaaataactatttcctagaggttaacatcaattagtataagtctattaaaaagggcgattagaaattctaaccgccctttattttacgcttttacaatcgcagcgtcaaatcctgccgatttcaatttttcctgcaaggtaactgcgttatctctgttccggtatgctcctacctgcactctgtaaatact

SEQ ID NO: 34940 - DNA, 260 bp, Unknown
  Description of Unknown: RightRegion for integrase B8941 sequence
ataaaagaaatttatttgaatgaagcctttgaaattactggctttatattttatatctaggacttgtactaaataactatttcctagcggttaacattaattagtacaagtctattaaaaagggcgattagaaattctaaccgccctttgttttacgcttttacaatcgcagcatcaaatcctgctgctttcaatttttcctgcaaggcaatagcatttgctttgttgcgatacgctccgacctgtacacgataaataga

SEQ ID NO: 34941 - DNA, 260 bp, Unknown
  Description of Unknown: RightRegion for integrase B8942 sequence
ataaaagaaatttatttgaatgaagcctttgaaattactggctttatattttatatctaggacttgtactaaataactatttcctagtgggaatctgaattgtttttctgcgctggcaaaatgacttgaagtcatggtcacgacgtgatccgcatagccggccgctacacacatcgcaccgagagacagcgattccccacaggtactgcaggctccgtaaagtccaaagagcggtacctgaaaatccagcaccccaaacg

SEQ ID NO: 34942 - DNA, 260 bp, Unknown
  Description of Unknown: RightRegion for integrase B8943 sequence
cgcacgatccagcgcatcgacgcagacaatgacggtgcgttttttgtaacgcccagttagtcttattttcacgtcacaacgcctacgtcaaaatataactaaccccccggcatttgccgaggggtttaagtttagctttccaatttccgcatgacgctattataaacccgctcgttgaccactttcaagctgtccatcagctcgtccatgacctcccacgcacgggctgggtcaacgttagacgccgcccggagaaattc

SEQ ID NO: 34943 - DNA, 260 bp, Unknown
  Description of Unknown: RightRegion for integrase B8944 sequence
ataaaagaaatttatttgaatgaagcctttgaaattactggctttatattttatatctaggacttgtactaagcaactatttcctagtggttaacattaattagtacaagtatattaaatcgaactataatgaatgcattcttatcaaacataggtttttctgtaaccattaattttactgtgttttgagcattttttatttgcttataaaatggcagatttgccatagaagtatataaaatgcaacacgaaattgaaca

SEQ ID NO: 34944 - DNA, 260 bp, Unknown
  Description of Unknown: RightRegion for integrase B8945 sequence
atcctccgtgagctccatgtctaccgcggcaccattcagggcccgccggtttttttgtgaaattcagtcgtatttattgacatagtgcattctatcctttatactaaataccacaaaaacctgcaattcaaggaatttctggaaaagtgtgttttaatgtagaaaaacagggaaaaggggtatttggatggacgcgcggggattggtgaaggcgctgggggtgccggcgcactgggacgggtgcttgcagctggagtatg

SEQ ID NO: 34945 - DNA, 260 bp, Unknown; identical to SEQ ID NO: 34912
  Description of Unknown: RightRegion for integrase B8946 sequence

SEQ ID NO: 34946 - DNA, 260 bp, Unknown
  Description of Unknown: RightRegion for integrase B8947 sequence
cgcacgatccagcgcatcgacgcagacaatgacggtgcgttttttgtaacgcctagttagtcttattttcatgtcacaacgcctacgtcaaaatataactaaccccccggcatttgccgagggggttaagtttagctttccaatttccgcatgacgctattataaacccgctcgttgatcactttcaagctgtccatcagctcgtccatgacctcccacgcacgggctgggtcaacgttagacaccgcccggaggaaatc

SEQ ID NO: 34947 - DNA, 260 bp, Unknown
  Description of Unknown: RightRegion for integrase B8948 sequence
ataaaagaaatttatttgaatgaagcctttgaaattactggctttatattttatatctaggacttgtactaaataactatttcctagaggttaacattaattagtacaagtctattataaagggcgattagaaattctaaccgccctttattttacgcttttacaatcgcagcgtcaaatcctgccgatttcaatttttcctgcaaggcaatagcatttgctttattgcgatacgctccgacctgtacacgataaataga

SEQ ID NO: 34948 - DNA, 260 bp, Unknown
  Description of Unknown: RightRegion for integrase B8949 sequence
ataaaagaaatttatttgaatgaagcctttgaaattactggctttatattttatatctaggacttgtactaaataactatttcctagcgggaatctgaattgtttttctgcgctggcaaaatgacttgaagtcatggtcacgacgtgatccgcatagcctgccgctacacacatcgcaccgagagacagcgattccccacaggtactgcaggctccgtaaagtccaaagagcggtacctgaaaatccagcaccccaaacg

SEQ ID NO: 34949 - DNA, 260 bp, Unknown
  Description of Unknown: RightRegion for integrase B8950 sequence
attatcaaagaaatcaaaatttaccctgataggcacatagaatattccttaaatgtttgaaaaatttttaatgaattttattacttaatatttctccctgtgtagttgcgataatattatgtaataaaatccccgccctcacaagagagcggggactatcgtcagtgcttcacgacaaactcatagtaccgagcgagtttgtccggagcggcgtcctggtcgtccagaaacgctttcgcaatttcggcatagaagtcgat

SEQ ID NO: 34950 - DNA, 260 bp, Unknown; identical to SEQ ID NO: 34940
  Description of Unknown: RightRegion for integrase B8951 sequence

SEQ ID NO: 34951 - DNA, 260 bp, Unknown
  Description of Unknown: RightRegion for integrase B8952 sequence
ataaaagaaatttatttgaatgaagcctttgaaattactggctttatattttatatctaggacttgtactaaacaactattttctaaaggttaacattaattagtacaagtttattaaaaatggcgattagaaattctaaccgccatttattttacgcttttacaatcgcagcatcaaaccctgctgctttcaatttttcctgcaaggtaactgcgttatctctgttccggtatgatcctacctgcactctgtaaatgct

SEQ ID NO: 34952 - DNA, 260 bp, Unknown
  Description of Unknown: RightRegion for integrase B8953 sequence
cgcacgatccagcgcatcgacgcagacaatgacggtgcgttttttgtaacgcccagttagtcttattttcatgtcacaacactaacattaaaatataactaaccccccggcatttgccgaggggttaaatttagctttccaatttccgcatgacgctattataaacccgctcgttgaccactttcaagctgtccatcagctcgtccatgacctcccacgcacgggctgggtcaacgttagataccgctcggaggaaatcg

SEQ ID NO: 34953 - DNA, 260 bp, Unknown
  Description of Unknown: RightRegion for integrase B8954 sequence
ataaaagaaatttatttgaatgaagcctttgaaattactggctttatattttatatctaggacttgtactaaataactatttcctagaggttaacattaattagtacaagtctattaaatcgaactataatgaatgcattcttatcaaactaggttttactgtaacaattgattttactgtgttttgatcattttttatttgcttataaaataacagatttgccatagaagtatataaaatgcaacacgaaattggacat

SEQ ID NO: 34954 - DNA, 260 bp, Unknown
  Description of Unknown: RightRegion for integrase B8955 sequence
cgcacaatccagcgcatcgacgcagacaatgacggtgcgttttttgtaacgccaagttagtcttattttcacgtcgcaacgcttacgttaaaatataactaaccccccggcatttgccgagggggttaagtttagctttccaatttccgcatgacgctattataaacccgctcgttgatcactttcaaactgtccatcagctcgtccatgacctcccacgcacgggctgggtcaacgttagacaccgcccgaaggaaatc

SEQ ID NO: 34955 - DNA, 260 bp, Unknown
  Description of Unknown: RightRegion for integrase B8956 sequence
ataaaagaaatttatttgaatgaagcctttgaaattactggctttatattttatatctaggacttgtactaaataactatttcctagaggttaacataaattagtacaagtctattaaaaagggcgattagaaattctaaccgccctttattttacgcttttacaatcgcagcatcaaatcctgctgctttcaatttttcctgcaatgcaactgcgttatctctgttccggtatgctcctacctgcactctgtaaatgct

SEQ ID NO: 34956 - DNA, 260 bp, Unknown
  Description of Unknown: RightRegion for integrase B8957 sequence
cgcacaatccagcgcatcgacgcagacaatgacggtgcgttttttgtaacgccaagttagtcttattttcatgtcgcaacgcctacattaaaatataactaacccctcggcatttgtcgaggggttaagtttagctttccaatttccgcatgacgctattgtaaacccgctcgttgaccactttcaagctgtccatcagctcgtccatgacctcccacgcacgggctgggtcaacgttagacaccgcccggaggaaatcg

SEQ ID NO: 34957 - DNA, 260 bp, Unknown
  Description of Unknown: RightRegion for integrase B8958 sequence
ataaaagaaatttatttgaatgaagcctttgaaattactggctttatattttatatctaggacttgtactaaataactatttcctagcggttaacattaattagtacaagtctattaaaaatggcgattagaaattctaaccgccatttattttacgcttttacaatcgcagcgtcaaatcctgccgatttcaatttttcctgcaaggaaatagcatttgctttgttgcgatacgctccgacctgtacacgataaataga

SEQ ID NO: 34958 - DNA, 260 bp, Unknown
  Description of Unknown: RightRegion for integrase B8959 sequence
cgcacaatccagcgcatcgacgcagacaatgacggtgcgttttttgtaacgccaagttagtcttattttcatgtcgcaacgctaacgttaaaatataactaaccccccggcatttgccgaggggttaagtttagctttccaatttccgcatgacgctattgtaaacccgctcgtttatcacctgcaagctgtccatcagctcgtccatgacctcccacgcacgggctgggtcaacgttagacaccgcccggaggaaatcg

SEQ ID NO: 34959 - DNA, 260 bp, Unknown
  Description of Unknown: RightRegion for integrase B8960 sequence
ataaaagaaatttatttgaatgaagcctttgaaattactggctttatattttatatctaggacttgtactaaataactatttcctagaggttaacattaattagtacaagtctattaaaaatggcgattagaaattctaaccgccatttattttacgcttttacaatcgcagcgtcaaatcctgccgatttcaatttttcctgcaaggcaatagcatttgctttattgcgatacgctccgacctgtacacgataaataga

SEQ ID NO: 34960 - DNA, 260 bp, Unknown
  Description of Unknown: RightRegion for integrase B8961 sequence
cgcacaatccagcgcatcgacgcagacaatgacggtgcgttttttgtaacgccaagttagtcttattttcatgtcgcaacactaacattaaaatataactaaccccccggcatttgccgaggggttaaatttagctttccaatttccgcatgacgctattgtaaacccgctcgttgaccactttcaagctgtccatcagctcgtccatgacctcccacgcacgggctgggtcaacgttagacaccgctcggaggaaatcg

SEQ ID NO: 34961 - DNA, 260 bp, Unknown
  Description of Unknown: RightRegion for integrase B8962 sequence
cgcacaatccagcgcatcgacgcagacaatgacggtgcgttttttgtaacgccaagttagtcttattttcacgtcgcaacgcttacgttaaaatataactaaccccccggcatttgccgagggggttaagtttagctttccaatttccgcatgacgctattataaacccgctcgttgaccactttcaaactgtccatcagctcgtccatgacctcccacgcacgggctgggtcaacgttagacaccgcccgaaggaaatc

SEQ ID NO: 34962 - DNA, 260 bp, Unknown
  Description of Unknown: RightRegion for integrase B8963 sequence
ataaaagaaatttatttgaatgaagcctttgaaattactggctttatattttatatctaggacttgtactaaataactatttcctagtggttaacgttaattagtacaagcctattaaaaagggcgattagaaattctaaccgccctttattttacgcttttacaatcgcagcatcaaatcctgctgctttcaatttttcctgcaaagcaatagcatttgctttgttgcgatacgccccgacctgtacacgataaataga

SEQ ID NO: 34963 - DNA, 260 bp, Unknown
  Description of Unknown: RightRegion for integrase B8964 sequence
cgcacaatccagcgcatcgacgcagacaatgacggtgcgttttttgtaacgccaagttagtcttattttcatgttgcaacactaacataaaaatataactaaccccccggcatttgccgaggggttaaatttagcttttcaatttccgcatgacgctattataaacccgctcgttgaccactttcaagctgtccatcagctcgtccatgacctcccacgcacgggctgggtcaacgttagacaccgcccggaggaaatcg

SEQ ID NO: 34964 - DNA, 260 bp, Unknown
  Description of Unknown: RightRegion for integrase B8965 sequence
ataaaagaaatttatttgaatgaagcctttgaaattagtggctttatattttatatctaggacttgtactaaataactgtttcctagcgggaatctgaattgtttttctgcgctggcaaaatgacttgaagtcatggtcacgacgtgatccgcatagcctgccgctacacacatcgcaccgagagacagcgattccccacaggtactgcaggctccgtaaagtccaaagagcggtacctgaaaatccagcaccccaaacg

SEQ ID NO: 34965 - DNA, 260 bp, Unknown
  Description of Unknown: RightRegion for integrase B8966 sequence
ataaaagaaatttatttgaatgaagcctttgaaattactggctttatattttatatctaggacttgtactaagcaactatttcctagcggttaacattaattagtacaagtctattaaaaatggcgattagaaattctaaccgccatttattttacgcttttacaatcgcagcgtcaaatcctgctgctttcaatttttcctgcaaggaaatagcatttgctttgttgcgatacgctccgacctgtacacgataaataga

SEQ ID NO: 34966 - DNA, 260 bp, Unknown
  Description of Unknown: RightRegion for integrase B8967 sequence
atcgaggttgaggggctttacccgaagcaagtcttttttatcggtcaggaaagactctaacgtacatgacagttctgtcacgttacttagaggctaccatccctataccatagtgaagtattttgcaaccttatacggtggtgcgtcctcgtcgttcaggaagtcctgtgccaagtcgaaatagaagtccggagagtcacctgcatatttctgtccagtatccttggagtcgttataatacatattcattgccagataaa

SEQ ID NO: 34967 - DNA, 260 bp, Unknown
  Description of Unknown: RightRegion for integrase B8968 sequence
atcgaggttgaggggctttacccgaagcaagtcttttttatcggtcaggaaagcctctaacgtacatgacagttctgtcacgttacttagaggctaccatccctataccatagtgaagtattttgcaaccttatacggtggtgcgtcctcgtcgttcaggaagtcctgtgccaagtcgaaatagaagtctggagagtcacctgcatatttctgtccagtatccttggagtcgttataatacatattcattgccagataaa

SEQ ID NO: 34968 - DNA, 260 bp, Unknown
  Description of Unknown: RightRegion for integrase B8969 sequence
ataaaagaaatttatttgaatgaagcctttgaaattactggctttatattttatatctaggacttgtactaaataactatttcctagcggttaacattaattagtacaagtctattaaaaatggcgattagaaattctaaccgccatttattttacgcttttacaatcgcagagtcaaatcctgctgctttcaatttttcctgcaaggaaatagcatttgctttgttgcgatacgctccgacctgtacacgataaataga

SEQ ID NO: 34969 - DNA, 260 bp, Unknown
  Description of Unknown: RightRegion for integrase B8970 sequence
atcataaaagaactgcacatctatcgtggcaccgttcaaggtccgcctatttttttataattaagtcgcagtaactatcatggatagaatgcgcttggctacaccaaccgcccgctggacggcatcttcggcggcggcacggaaaacgcggtgcgtgcgttccagcgcgccgtgagcctgacggcggacggcatctgcggctgcaacacctggaaaaagctgacggcggccagcgtgggcatcggccgcacccgcacagt

SEQ ID NO: 34970 - DNA, 260 bp, Unknown
  Description of Unknown: RightRegion for integrase B8971 sequence
ataaaagaaatttatttgaatgaagcctttgaaattactggctttatattttatatctaggacttgtactaaataactatttcctagaggttaacattaattagtacaagtctattaaaaatggcgattagaaattctaaccgccatttattttacgcttttacaatcgcagcgtcaaatcctgctgctttcaatttttcctgcaaggaaatagcatttgctttgttgcgatacgctccgacctgtacacgataaataga

SEQ ID NO: 34971 - DNA, 260 bp, Unknown
  Description of Unknown: RightRegion for integrase B8972 sequence
ataaaagaaatttatttgaatgaagcctttgaaattactggctttatattttatatctaggacttgtactaaataactatttcctagaggttaacatcaattagtacaagtctattaaaaagggcgattagaaattctaaccgccatttattttacgcttttacaatcgcagcgtcaaatcctgctgctttcaatttttccttcaaggaaatagcatttgctttgttgcgatacgctccgacctgtacacgataaataga

SEQ ID NO: 34972 - DNA, 260 bp, Unknown
  Description of Unknown: RightRegion for integrase B8973 sequence
ataaaagaattttatttgaatgaagcctttgaaattactggctttatattttatatctaggacttgtactaaataactatttcctagcgggaatctgaattgtttttctgcgctggcaaaatgacttgaagtcatggtcacgacgtgatccgcatagccggccgctacacacatcgcaccgagagacagcgattccccacaggtactgcaggctccgtaaagtccaaagagcggtacctgaaaatccagcaccccaaacg

SEQ ID NO: 34973 - DNA, 260 bp, Unknown
  Description of Unknown: RightRegion for integrase B8974 sequence
cgcacgatccagcgcatcgacgcagacaatgacggtgcgttttttgtaacgcctagttagtcttattttcatgtcacaacgcctacgttaaaatataactaaccccccggcatttgccgagggggttaagtttagctttccaatttccgcatgacgctattatacacccgctcgttgaccactttcaagctgtccatcagctcgtccatgacctcccacgcacgggccgggtcaacgttagacaccgcgcggagaaaatc

SEQ ID NO: 34974 - DNA, 260 bp, Unknown
  Description of Unknown: RightRegion for integrase B8975 sequence
atcgaggttgaagggctttacccgaagcaagtcttttttatcggtcaggaaagactctaacgtacatgacagttctgtcacgtcacttagaggctaccatccctataccatagtgaagtattttgcaaccttatacggtggtgcgtcctcgtcgttcaggaagtcctgtgccaagtcgaaatagaagtctggagagtcacctgcatatttctgtccagtatccttggagtcgttataatacatattcattgccagataaa

SEQ ID NO: 34975 - DNA, 260 bp, Unknown; identical to SEQ ID NO: 34929
  Description of Unknown: RightRegion for integrase B8976 sequence

SEQ ID NO: 34976 - DNA, 260 bp, Unknown
  Description of Unknown: RightRegion for integrase B8977 sequence
ataaaagaaatttatttgaatgaagcctttgaaattactggctttatattttatatctaggacttgtactaaataactatttcctaaaggaaaacggaactgtttctctgcactggcgaaatggctcgatgtcatggtcacaacatggtcggcatagcctgccgccacacacatcgcgccaagcgacaatgattctccgcacgtgctgcatgccccgtataatccgaaaagcggcacctgaaaatccagcacgccgaaag

SEQ ID NO: 34977 - DNA, 260 bp, Unknown
  Description of Unknown: RightRegion for integrase B8978 sequence
cgcacaatccagcgcatcgacgcagacaatgacggtgcgttttttgtaacgcccagttagtcttattttcatgtcgcaacgctaacgttaaaatataactaaccccccggcatttgccgaggggttaaatttagctttccaatttccgcatgacgctattataaacccgctcgttgaccactttcaagctgtccatcagctcgtccatgacctcccacgcacgggctgggtcaacgttagacaccgcccgaaggaaatcg

SEQ ID NO: 34978 - DNA, 260 bp, Unknown; identical to SEQ ID NO: 34948
  Description of Unknown: RightRegion for integrase B8979 sequence

SEQ ID NO: 34979 - DNA, 260 bp, Unknown
  Description of Unknown: RightRegion for integrase B8980 sequence
ataaaagaaatttatttgaatgaagcctttgaaattactggctttatattttatatctaggacttgtactaagtaactatttcctagcgggaatctgaattgtttttctgcgctggcaaaatggcttgaagtcatggtcacgacgtgatccgcatagccggccgctacacacatcgcaccgagagacagcgattccccacaggtactgcaggctccgtaaagtccaaagagcggtacctgaaaatccagcaccccaaacg

SEQ ID NO: 34980 - DNA, 260 bp, Unknown
  Description of Unknown: RightRegion for integrase B8981 sequence
ataaaagaaatttacttgaatgaagcctttgaaattactggctttatattttatatctaggacttgtactaaataactatttcctagcgggaatctgaattgtttttctgcgctggcaaaatggcttgaagtcatggtcacgacgtgatccgcatagccggccgctacacacatcgcaccgagagacagcgattccccacaggtactgcaggctccgtaaagtccaaagagcggtacctgaaaatccagcaccccaaacg

SEQ ID NO: 34981 - DNA, 260 bp, Unknown
  Description of Unknown: RightRegion for integrase B8982 sequence
cgcacgattcagcgcatcgacgcagacaatgacggtgcgttttttgtaacgccaagttagtcttattttcatgtcacaacgcctatattaaaatataactaaccccccggcatttgccgaggggttaagtttagctttccaatttccgcatgacgctattataaacccgctcattgaccactttcaagctgtccatcagctcgtccatgatctcccacgcacgggctgggtcaacgttagacaccgcccggaggaaatcg

SEQ ID NO: 34982 - DNA, 260 bp, Unknown
  Description of Unknown: RightRegion for integrase B8983 sequence
ataaaagaaatttatttgaatgaagcctttgaaattactggctttatattttatatctaggacttgtactaaataactatttcctagaggttaacattaattagtacaagtctattaaatcgaactataatgaatgcattcttatcaaacctaggttttactgtaaccattgattttactttgttttgagcattttttatttgcttataaagtggcaaatttgccatataagtatataaaatgaaacacgaaattgaacg

SEQ ID NO: 34983 - DNA, 260 bp, Unknown
  Description of Unknown: RightRegion for integrase B8984 sequence
ataaaagaaatttatttgaatgaagcctttgaaattactggctttatattttatatctaggacttgtactaaataactatttcctagaggttaacatcaattagtacaagtctattaaaaagggcgattagaaattctaaccgccctttattttacgcttttacaatcacagcgtcaaatcctgccgatttcaatttttcctgcaaggcaatagcatttgctttattgcgatacgctccgacctgtacacgataaataga

SEQ ID NO: 34984 - DNA, 260 bp, Unknown
  Description of Unknown: RightRegion for integrase B8985 sequence
ataaaagaaatttatttgaatgaagcctttgaaattactggctttatattttatatctagggcttgtactaaataactatttcctaaaggaaaacggaactgtttctctgcactggcgaaatggctcgatgtcatggtcacaacatggtcggcatagcctgccgccacacacatcgcgccaagcgacaatgattctccgcacgtgctgcatgccccgtataatccgaaaagcggcacctgaaaatccagcacgccgaaag

SEQ ID NO: 34985 - DNA, 260 bp, Unknown
  Description of Unknown: RightRegion for integrase B8986 sequence
ataaaagaaatttatttgaatgaagcctttgaaattactggctttatattttatatctaggacttgtactaaataactatttcctagcgggaatctgaattgtttttctgcgctggcaaaatggcttgaagtcatggtcacgacatggtccgcatagccggccgctacacacatcgcgccgagagacagcgattctccacaggtactacaggctccgtaaagtccaaagagcggtacctgaaaatccagcaccccaaacg

SEQ ID NO: 34986 - DNA, 260 bp, Unknown; identical to SEQ ID NO: 34947
  Description of Unknown: RightRegion for integrase B8987 sequence

SEQ ID NO: 34987 - DNA, 260 bp, Unknown
  Description of Unknown: RightRegion for integrase B8988 sequence
ataaaagaaatttatttgaatgaagcctttgaaattactggctttatattttatatctaggacttgtactaaacagctatttcctagaggttaacatcaattagtacaagtctattaaaaagggcgattagaaattctaaccgccctttattttacgcttttacaatcgcaacatcaaatcctgctactttcaatttttcctgcaatgcaactgcgttatctctgttccggtatgctcctacctgcactctgtaaatgct

SEQ ID NO: 34988 - DNA, 260 bp, Unknown
  Description of Unknown: RightRegion for integrase B8989 sequence
aaagaaatagaaaaaaatctaaaaagaggagctgatggaaaatgggtaaagtcagagtaataccatcaacgattaatcctttaacgcatcaaagtattgtcgccaatgtgaaaagaaaagtagctgcttatgcacgtgtttcaactgattcagatgaacaatatacttcatatgaagctcaagttaattattacactggttatattcagtcaagagtagactgggaatacatcaatgtttatgcggatgaaggaatatct

SEQ ID NO: 34989 - DNA, 260 bp, Unknown
  Description of Unknown: RightRegion for integrase B8990 sequence
ataaaagaaatttatttgaatgaagcctttgaaattactggctttatattttatatctaggacttgtactaaacagctattttctaaaggttaacattaattagtacaagtatattaaaaaaggcgattagaaattctaaccgccctttattttacgctttcacaatggcaacttcaaatcctgctgctttcaatttatttttcatatacagttacatatttttctgatgctgtaatgtataatcccgatttgagcctat

SEQ ID NO: 34990 - DNA, 260 bp, Unknown
  Description of Unknown: RightRegion for integrase B8991 sequence
ataaaagaaatttatttgaatgaagcctttgaaattactggctttatattttatatctaggacttgtactaaataactatttcctagcgggaatctgaattgtttttctgcgctggcaaaatggcttgaagtcatggtcacgacgtgatccgcatagccggccgctacacacatcgcaccgagagacagcgattccccacaggtactgcaggctccgtaaagtccaaagagcggtacctgaaaatccagcaccccaaacg

SEQ ID NO: 34991 - DNA, 260 bp, Unknown; identical to SEQ ID NO: 34884
  Description of Unknown: RightRegion for integrase B8992 sequence

SEQ ID NO: 34992 - DNA, 260 bp, Unknown
  Description of Unknown: RightRegion for integrase B8993 sequence
cgcacaatccagcgcatcgacgcagacaatgacggtgcgttttttgtaacgccaagttagtcttattttcatgtcacaacgcctacgttaaaatataactaaccccccggcatttgccgaggggttaagtttagctttccaatttccgcatgacgctattataaacccgctcgttgaccactttcaagctgtccatcagatcgtccatgacctcccacgcacgggctgggtcaacgttagataccgctcgtaggaaatcg

SEQ ID NO: 34993 - DNA, 132 bp, Unknown
  Description of Unknown: RightRegion for integrase B8994 sequence
cgcacaatccagcgcatcgacgcagacaatgacggtgcgttttttgtaacgcccagttagtcttattttcatgtcgcaacgctaacgttaaaatataactaaccccccggcatttgccgaggggttaaattt

SEQ ID NO: 34994 - DNA, 86 bp, Unknown; identical to SEQ ID NO: 34901
  Description of Unknown: RightRegion for integrase B8995 sequence

SEQ ID NO: 34995 - DNA, 260 bp, Unknown
  Description of Unknown: RightRegion for integrase B8996 sequence
cgcacaatccagcgcatcgacgcagacaatgacggtgcgttttttgtaacgccaagttagtcttattttcatgtcacaacgcctacgtcaaaatataactaaccccccggcatttgccgaggggttaaatttagctttccaatttccgcatgacgctattataaacccgctcgttgaccactttcaagctgtccatcagctcgtccatgacctcccacgcacgggctgggtcaacgttagacaccgcccggaggaaatcg

SEQ ID NO: 34996 - DNA, 260 bp, Unknown
  Description of Unknown: RightRegion for integrase B8997 sequence
attgtaaaagaaataaaaatatcccccgacacttacgtggaggatattatatttttttagtttttgttatacagtaactagccgaaaccaccaggttaaggtcagttaccgtataacaaaatatgatagaaataaaggagaagtaattatattatacaagaagaaagaggacgtttcaagcgccctcttttatttttcgcaaaactgaccgatattcacgcgggtacattgcttctatggctttcatgtgttcatcaagt

SEQ ID NO: 34997 - DNA, 260 bp, Unknown
  Description of Unknown: RightRegion for integrase B8998 sequence
attgtaaaagaaataaaaatatcccccaacgaatttgtggaggatattatatttttttagtttttgttatgcagtaactagccgtaaccaccgggttaaaaccagttactgcataacaaaatattaaaaataaaggagatacagttacattatacagaaagaaagaggacgtttcaagcgccctcttttatttttcgcaaaaccgaacgatattctcgcggatacattgcttctatggctttcatgtgttcgtcaagtac

SEQ ID NO: 34998 - DNA, 260 bp, Unknown; identical to SEQ ID NO: 34997
  Description of Unknown: RightRegion for integrase B8999 sequence

SEQ ID NO: 34999 - DNA, 260 bp, Unknown
  Description of Unknown: RightRegion for integrase B9000 sequence
attgtaaaagaaataaaaatatcccccaacgaatttgtggaggatattatatttttttagtttttgttatgcagtaactagccgtaaccaccagattaaagctagttactacataactaaatattaaaaataaaggagatacagttacattatacaaaaagaaagaggatgtttcaagcaccctcttttatttttcgcaaaactgaccgatattcacgcgggtacattgcttcgatggctttcatgtgttcgtcaagcac

SEQ ID NO: 35000 - DNA, 260 bp, Unknown
  Description of Unknown: RightRegion for integrase B9001 sequence
attatacgggaaatccccgtgaacaacggcgctgtatcaggcgatccgatttttttataattttccgttgtactttctatattcacgacaccaacgccacaaagaacacggccgccgcgctgccggacgtcatccgctggttcaaaaacgcaggctaccgcttcgataccgtggaccatctggaaaaaaagccgtaaccgccgccgtcgccccgcctgctgtggacaaaatacggccggaatatgaaaaaaatgcaaatt

SEQ ID NO: 35001 - DNA, 260 bp, Unknown; identical to SEQ ID NO: 34997
  Description of Unknown: RightRegion for integrase B9002 sequence

SEQ ID NO: 35002 - DNA, 260 bp, Unknown
  Description of Unknown: RightRegion for integrase B9003 sequence
attgtaaaagaaataaaaatatcccccgacacttacgtggaggatattatatttttttagtttttgttatacagtaactagccgtaaccaccaggttaaggtcagttaccgtataacaaaatatgatagaaataaaggagaagtaattatattatacaagaagaaagaggacgtttcaagcgccctcttttatttttcgcaaaactgaccgatattctcgcggatacattgcttctatagctttcatgtgttcgtcaagc

SEQ ID NO: 35003 - DNA, 96 bp, Unknown
  Description of Unknown: RightRegion for integrase B9004 sequence
attgtaaaagaaataaaaatatcccccgacacttacgtggaggatattatatttttttagtttttgttatacagtaactagccgaaaccaccaggt

SEQ ID NO: 35004 - DNA, 260 bp, Unknown
  Description of Unknown: RightRegion for integrase B9005 sequence
aaaacagtcaaaaaaatctatttatctagcgattcagtggccgattttgatttaatctaagccgttatataatatgattaaaccgtcaggttttatcatattatataacgcataaaatgagccccagaaactggggctcatttgctacactgcgtctattttccgcataacgctattgtacactcttgtgttgactactttgagcgtgtccattaactcatccatgatatcccacaccgccgcagggtctttgccctcca

SEQ ID NO: 35005 - DNA, 260 bp, Unknown
  Description of Unknown: RightRegion for integrase B9006 sequence
cgcatcattacgcgaatagagatgaatgatcagcagaatctcaaagtatttttttcataatttaatttatcctaataatacattaccgacatataaagtattattaggataataataaatattccacatatagtttttttaatccttggcagaacctacaactttgcctttttctgtgcgctaaaaaaatacgtcaatattggcatttattttttatatctacttgacataatgccattattggcgtattatatagatat

SEQ ID NO: 35006 - DNA, 260 bp, Unknown
  Description of Unknown: RightRegion for integrase B9007 sequence
attgtaaaagagataaaaatatcccccaacgagtttgtggaggatattatatttttttagtttttgttatgtagtaactagccgtaaccaccagattaaagctagttactacataactaaatataaaaaataaaggagatacagttacattatataaaaagaaagaggatgtttcaagcaccctcttttatttttcgcaaaactgaccgatattctcgcggatacattgcttctatggctttcatgtgttcatcaagtac

SEQ ID NO: 35007 - DNA, 260 bp, Unknown; identical to SEQ ID NO: 35002
  Description of Unknown: RightRegion for integrase B9008 sequence

SEQ ID NO: 35008 - DNA, 260 bp, Unknown
  Description of Unknown: RightRegion for integrase B9009 sequence
attgtaaaagagataaaaatatcccccaacgagtttgtggaggatattatatttttttagtttttgttatacagtaactagccgtaaccaccaggttaaggtcagttaccgtataacaaaacatgatagaaataaaggagaagtaattatattatacaagaagaaagaggacgtttcaagcgccctcttttatttttcgcaaaactgaccgatattctcgcggatacattgcttctatggctttcatgtgttcgtcaagc

SEQ ID NO: 35009 - DNA, 142 bp, Unknown
  Description of Unknown: RightRegion for integrase B9010 sequence
attgtaaaagaaataaaaatatcccccgacacttacgtggaggatattatatttttttagtttttgttatacagtaactagccgaaaccaccaggtagcataggtagaaaatttatacccttttctgtagtcaaacttttct

SEQ ID NO: 35010 - DNA, 260 bp, Unknown
  Description of Unknown: RightRegion for integrase B9011 sequence
aaaacagtcaaaaaaatctatttatctagcgattcagtggccgattttgatttaatctaagccgttatataatatgattaaaccgtcaggtttcatcatattatacaacgcgcaaaatgagccccagaaactggggctcatttgctacactgcgtctattttccgcataacgctattgtacactcttgtgttgactactttgagcgtgtccattaactcatccatgatatcccacaccgccgcagggtctttgccctcca

SEQ ID NO: 35011 - DNA, 260 bp, Unknown; identical to SEQ ID NO: 34949
  Description of Unknown: RightRegion for integrase B9012 sequence

SEQ ID NO: 35012 - DNA, 260 bp, Unknown
  Description of Unknown: RightRegion for integrase B9013 sequence
attgtaaaagaaataaaaatatcccccgacacttacgtggaggatattatatttttttagtttttgttatacagtaactagccgtaaccaccaggtagcataggtagaaaatttatacccttttctgtagtcaaacttttctaccgctttgatcagtccaagattgccttcctgaatcaaatcaagaaactgcatccccctgccggaataccgcttagcaatacttaccgtaagtcgaagattggcttcggaaagcttct

SEQ ID NO: 35013 - DNA, 260 bp, Unknown
  Description of Unknown: RightRegion for integrase B9014 sequence
attgtgaaagaaataaaaatatcccccgacacttacgtggaggatattatatttttttagtttttgttatgcagtaactagccgtaaccaccaggtagcataggtagaaaatttatacccttttctgtagtcaaacttttctaccgctttgatcagtccaagattgccttcctgaatcaaatcaagaaactgcatccccctgccggaataccgcttagcaatacttaccgtaagtcgaagattggcttcggaaagcttct

SEQ ID NO: 35014 - DNA, 95 bp, Unknown
  Description of Unknown: RightRegion for integrase B9015 sequence
attgtaaaagagataaaaatatcccccaacgagtttgtggaggatattatatttttttagtttttgttatacagtaactagccgtaaccaccagg

SEQ ID NO: 35015 - DNA, 260 bp, Unknown
  Description of Unknown: RightRegion for integrase B9016 sequence
attgtaaaagaaataaaaatatcccccaacgaatttgtggaggatattatatttttttagtttttgttatgcagtaactagccgtaaccaccgggttaaagctagttactgtataaataaatattaaaaataaaagagatacagttacattatacagaaagaaagaggacgtttcaagcgccctcttttatttttcgcaaaactgatcgatattcacgcgggtacattgcttcgatggctttcatgtgttcgtcaagcac

SEQ ID NO: 35016 - DNA, 260 bp, Unknown
  Description of Unknown: RightRegion for integrase B9017 sequence
attgtaaaagaaataaaaatatcccccgacaagtttgtggaggatattatatttttttagtttttgttatacagtaactagccgtaaccaccgggttaaaaccagttactgtataacaaaatgttaaaaataaaggagatacagttacattatacagaaagaaagaggacgtttcaagcgccctcttttatttttcgcaaaaccgaacgatattcacgcggatacattgcttctatggctttcatgtgttcgtcaagtac

SEQ ID NO: 35017 - DNA, 95 bp, Unknown
  Description of Unknown: RightRegion for integrase B9018 sequence
attgtaaaagaaataaaaatatcccccgacacttacgtggaggatattatatttttttagtttttgttatacagtaactagccgaaaccaccagg

SEQ ID NO: 35018 - DNA, 260 bp, Unknown
  Description of Unknown: RightRegion for integrase B9019 sequence
attgtaaaagaaataaaaatatcccccgacacttacgtggaggatattatatttttttagtttttgttatacagtaactagccgaaaccaccaggttaaggtcagttaccgtataacaaaatatgatagaaataaaggagaagtaattatattatacaagaagaaagaggacgtttcaagcgccctcttttatttttcgcaaaactgaccgatattctcgcggatacattgcttctatagctttcatgtgttcgtcaagc

SEQ ID NO: 35019 - DNA, 260 bp, Unknown; identical to SEQ ID NO: 35002
  Description of Unknown: RightRegion for integrase B9020 sequence

SEQ ID NO: 35020 - DNA, 260 bp, Unknown
  Description of Unknown: RightRegion for integrase B9021 sequence
attgtaaaagaaataaaaatatcccccgacacttacgtggaggatattatatttttttagtttttgttatacagtaactagccgaaaccaccaggtagcataggtagaaaatttatacccttttctgtagtcaaacttttctaccgctttgatcagtccaagattgccttcctgaatcaaatcaagaaactgcatccccctgccggaataccgcttggcaatacttaccgtaagtcgaagattggcttcagaaagcttct

SEQ ID NO: 35021 - DNA, 260 bp, Unknown; identical to SEQ ID NO: 35002
  Description of Unknown: RightRegion for integrase B9022 sequence

SEQ ID NO: 35022 - DNA, 260 bp, Unknown; identical to SEQ ID NO: 35002
  Description of Unknown: RightRegion for integrase B9023 sequence

SEQ ID NO: 35023 - DNA, 260 bp, Unknown
  Description of Unknown: RightRegion for integrase B9024 sequence
attgtaaaagaaataaaaatatcccccaacgaatttgtggaggatattatatttttttagtttttgttatgcagtaactagccgtaaccaccgggttaaaaccagttactgtataacaaaatattaaaaataaaggagatacagttacattatacagaaagaaagaggacgtttcaagcgccctcttttatttttcgcaaaaccgaacgatattctcgcggatacattgcttctatggctttcatgtgttcgtcaagtac

SEQ ID NO: 35024 - DNA, 260 bp, Unknown; identical to SEQ ID NO: 35004
  Description of Unknown: RightRegion for integrase B9025 sequence

SEQ ID NO: 35025 - DNA, 260 bp, Unknown
  Description of Unknown: RightRegion for integrase B9026 sequence
attgtaaaagaaataaaaatatcccccgacacttacgtggaggatattatatttttttagtttttgttatacagtaactagccgtaaccaccaggttaaggtcagttaccgtataacaaaatatgatagaaataaaggagaagtaattatattatacaagaagaaagaggacgtttcaagcgccctcttttatttttcgcaaaactgaccgatattctcgcggatacattgcttcgatggctttcatgtgttcgtcaagc

SEQ ID NO: 35026 - DNA, 260 bp, Unknown
  Description of Unknown: RightRegion for integrase B9027 sequence
attgtaaaagaaataaaaatatcccccgacacttacgtggaggatattatatttttttagtttttgttatacagtaactagccgtaaccaccaggttaaggtcagttaccgtataacaaaacatgatagaaataaaggagaagtaattatattatacaagaagaaagaggacgtttcaagcgccctcttttatttttcgcaaaactgaccgatattctcgcggatacattgcttctatggctttcatgtgttcgtcaagc

SEQ ID NO: 35027 - DNA, 260 bp, Unknown
  Description of Unknown: RightRegion for integrase B9028 sequence
attgtaaaagaaataaaaatatcccccgacacttacgtggaggatattatatttttttagtttttgttatacagtaactagccgtaaccaccaggtagcataggtagaaaatttatacccttttctgtagtcaaacttttctaccgctttgatcagtccaagattgccttcctgaatcaaatcaagaaactgcatccccctgccggaataccgcttggcaatacttaccgtaagtcgaagattggcttcggaaagcttct

SEQ ID NO: 35028 - DNA, 260 bp, Unknown
  Description of Unknown: RightRegion for integrase B9029 sequence
attgtaaaagaaataaaaatatcccccgacacttacgtggaggatattatatttttttagtttttgttatacagtaactagccgaaaccaccaggttaaggtcagttaccgtataacaaaatatgatagaaataaaggagaagtaattatattatacaagaagaaagaggacgtttcaagcgccctcttttatttttcgcaaaactgaccgatattctcgcggatacattgcttcgatggctttcatgtgttcgtcaagc

SEQ ID NO: 35029 - DNA, 260 bp, Unknown
  Description of Unknown: RightRegion for integrase B9030 sequence
attatacgggaaatccccgtgaacaacggcgctgtatcaggcgatccgatttttttataattttccgttgtactttctatatgcacgacaccaacgccacgaagaacacggccgccgcgctgccggacgttatccgctggttcaaaaatgcaggctaccgcttcgataccgtggaccatctggaaaaaaagccgtaaccgccgccgtcgccccgcctgctgtggacaaaatacggccggaatatgaaaaaaatgcaaatt

SEQ ID NO: 35030 - DNA, 260 bp, Unknown
  Description of Unknown: RightRegion for integrase B9031 sequence
attgtaaaagaaataaaaatatcccccaacgaatttgtggaggatattatatttttttaatatttagttatgtagtaactagccgtaaccaccaggtagcataggtagaaaatttatacccttttctgtagtcaaacttttctaccgctttgatcagtccaagattgccttcctgaatcaaatcaagaaactgcatccccctgccggaataccgcttggcaatacttaccgtaagtcgaagattggcttcagaaagcttc

SEQ ID NO: 35031 - DNA, 260 bp, Unknown; identical to SEQ ID NO: 35028
  Description of Unknown: RightRegion for integrase B9032 sequence

SEQ ID NO: 35032 - DNA, 92 bp, Unknown
  Description of Unknown: RightRegion for integrase B9033 sequence
attgtaaaagaaataaaaatatcccccgacacttacgtggaggatattatatttttttagtttttgttatacagtaactagccgtaaccacc

SEQ ID NO: 35033 - DNA, 260 bp, Unknown; identical to SEQ ID NO: 35025
  Description of Unknown: RightRegion for integrase B9034 sequence

SEQ ID NO: 35034 - DNA, 260 bp, Unknown
  Description of Unknown: RightRegion for integrase B9035 sequence
attataaaagagataaaaatatcccccaacgaatttgtggaggatattatatttttttagtttttgttatacagtaactagccgtaaccaccaggttaaggtcagttaccgtataacaaaatatgatagaaataaaggagaagtaattatattatacaagaagaaagaggacgtttcaagcgccctcttttatttttcgcaaaactgaccgatattctcgcggatacattgcttcgatggctttcatgtgttcgtcaagc

SEQ ID NO: 35035 - DNA, 260 bp, Unknown
  Description of Unknown: RightRegion for integrase B9036 sequence
attgtaaaagagataaaaatatcccccaacgaatttgtggaggatattatatttttttagtttttgttatatagtaactagccgcaaccaccgggttaaaacaagttactgtataactaaatattaaaaataaaagagatgcagttacattatacagaataaaagaggacgtttcaaccgccctcttttatttttcgcaaaactgaccgatattcacgcggatacattgcttcgatggctttcatgtgttcgtcaagtac

SEQ ID NO: 35036 - DNA, 260 bp, Unknown
  Description of Unknown: RightRegion for integrase B9037 sequence
cgcaccatcaggagaattgagattgatggtaagaaggtgtctaaggtgttttttatataatttttttattctttttgttgctattatgtcaccttgccacttgtaatagtaacataatagcaacaaatattaaaaaatatcaaaaataccactcaatgagtataagaaagatcattcactttgcactcattgagtgctattatatagacataacaaagaaaggaaccgcagaaagcggtagagtaaaaggaaatgagaaa

SEQ ID NO: 35037 - DNA, 260 bp, Unknown
  Description of Unknown: RightRegion for integrase B9038 sequence
attgtaaaggagataaaaatatcccccaacgaatttgtggaggatattatatttttttagtttttgttatacagtaactagccgtaaccaccgggttaaaaccagttactgtataacaaaatattaaaaataaaggagatgcagttacattatacagaaagaaagaggacgtttcaagcgccctcttttatttttcgcaaaaccgaacgatattcacgcggatacattgcttctatggctttcatgtgttcgtcaagtac

SEQ ID NO: 35038 - DNA, 260 bp, Unknown; identical to SEQ ID NO: 35020
  Description of Unknown: RightRegion for integrase B9039 sequence

SEQ ID NO: 35039 - DNA, 260 bp, Unknown
  Description of Unknown: RightRegion for integrase B9040 sequence
atcgtaaaagaaataaaaatatcccccaacgaatttgtggaggatattatatttttttagtttttgttatacagtaactagccgtaaccaccgggttagaaccagttactgtataacaaaatattaaaaataaaggagatgcacttacattatatagaaagaaagaggacgtttcaagcgccctcttttatttttcgcaaaaccgaacgatattctcgcggatacattgcttcaatggctttcatgtgttcgtcaagcac

SEQ ID NO: 35040 - DNA, 260 bp, Unknown; identical to SEQ ID NO: 35012
  Description of Unknown: RightRegion for integrase B9041 sequence

SEQ ID NO: 35041 - DNA, 260 bp, Unknown
  Description of Unknown: RightRegion for integrase B9042 sequence
attgtaaaagaaataaaaatatcccccgacacttacgtggaggatattatatttttttagtttttgttatacagtaactagccgaaaccaccaggtagcataagtagaaaatttatacccttttctgtagtcaaacttttctaccgctttgatcagtccaagattgccttcctgaatcaaatcaagaaactgcatccccctgccggaataccgcttggcaatacttaccgtaagtcgaagattggcttcggaaagcttct

SEQ ID NO: 35042 - DNA, 260 bp, Unknown; identical to SEQ ID NO: 35028
  Description of Unknown: RightRegion for integrase B9043 sequence

SEQ ID NO: 35043 - DNA, 260 bp, Unknown
  Description of Unknown: RightRegion for integrase B9044 sequence
attgtaaaagaaataaaaatatcccccgacacttacgtggaggatattatatttttttagtttttgttatacagtaactagccgaaaccaccaggttaaggtcagttaccgtataacaaaatatgatagaaataaaggagaagtaattatattatacaagaagaaagaggacgtttcaagcgccctcttttatttttcgcaaaactgaccgatattcacgtgggtacattgcttcgatggctttcatgtgttcgtcaagc

SEQ ID NO: 35044 - DNA, 260 bp, Unknown; identical to SEQ ID NO: 35002
  Description of Unknown: RightRegion for integrase B9045 sequence

SEQ ID NO: 35045 - DNA, 260 bp, Unknown; identical to SEQ ID NO: 35025
  Description of Unknown: RightRegion for integrase B9046 sequence

SEQ ID NO: 35046 - DNA, 260 bp, Unknown
  Description of Unknown: RightRegion for integrase B9047 sequence
attgtaaaagaaataaaaatatcccccgacacttacgtggaggatattatatttttttagtttttgttatacagtaactagccgaaaccaccagattaaagctagttactacataactaaatattaaaaataaaggagatacagttacattatacaagaagaaagaggacgtttcaagcgccctcttttatttttcgcaaaactgaccgatattcacgcgggtacattgcttcgatggctttcatatgttcgtcaagcac

SEQ ID NO: 35047 - DNA, 260 bp, Unknown
  Description of Unknown: RightRegion for integrase B9048 sequence
attgtaaaagaaataaaaatatcccccgacacttacgtggaggatattatatttttttagtttttgttatacagtaactaaccgcaaccaccaggtagcataggtagaaaatttatacccttttctgtagtcaaacttttctaccgctttgatcagtccaagattgccttcctgaatcaaatcaagaaactgcatccccctgccggaataccgcttggcaatacttaccgtaagtcgaagattggcttcggaaagcttct

SEQ ID NO: 35048 - DNA, 260 bp, Unknown
  Description of Unknown: RightRegion for integrase B9049 sequence
attgtaaaagaaataaaaatatcccccgacacttacgtggaggatattatatttttttagtttttgttatacagtaactagccgtaaccaccaggttaaggtcagttactgtataacaaaatatgatagaaataaaggagaggtaattatattatacaagaagaaagaggacgtttcaagcgccctcttttatttttcgcaaaactgaccgatattctcgcggatacattgcttcgatggctttcatgtgttcgtcaagc

SEQ ID NO: 35049 - DNA, 260 bp, Unknown
  Description of Unknown: RightRegion for integrase B9050 sequence
attgtaaaagaaataaaaatatcccccgacacttacgtggaggatattatatttttttagtttttgttatacagtaactagccgtaaccaccaggtagcataggtagaaaatttatacccttttctgtagtcaaacttttctaccgctttgatcagtccaagattgccttcctgaatcaaatcaagaaactgcatccccctgccggaataccgcttggcaatacttaccgtaagtcgaagattggcttcagaaagcttct

SEQ ID NO: 35050 - DNA, 260 bp, Unknown
  Description of Unknown: RightRegion for integrase B9051 sequence
attgtaaaagaaataaaaatatcccccaacgaatttgtggaggatattatatttttttagtttttgttatatagtaactagccgcaaccaccgggttaaaactagttactgtataacaaaatattaaaaataaaggagatacacttacattatacagaaagaaagaggacgtttcaagcgccctcttttatttttcgcaaaactgaccgatattctcgcggatacattgcttctatagctttcatatgttcgtctagcac

SEQ ID NO: 35051 - DNA, 260 bp, Unknown
  Description of Unknown: RightRegion for integrase B9052 sequence
cgcatcattacgcgaatagagatggacgatcagcagaatctcaaagtatttttttcataattcaatttatcctaataatacattaccgacatgtaatgtttatttaggataaaaattctttgagtgccatataaaattacactattctcaaacaatcttcaatgtgcggttctctttacacaataaaaagccgaggaatagtccccggttttttttcattatttcttattttcacattgacatatagtgcactatatgtt

SEQ ID NO: 35052 - DNA, 260 bp, Unknown
  Description of Unknown: RightRegion for integrase B9053 sequence
attgtaaaagaaataaaaatatcccccgacacttacgtggaggatattatatttttttagtttttgttatacagtaactagccgaaaccaccaggtagcataggtagaaaatttatacccttttctgtagtcaaacttttctaccgctttgatcagtccaagattgccttcctgaatcaaatcaagaaactgcatccccctgccggaataccgcttggcaatacttaccgtaagtcgaagattggcttcggaaagcttct

SEQ ID NO: 35053 - DNA, 260 bp, Unknown; identical to SEQ ID NO: 35023
  Description of Unknown: RightRegion for integrase B9054 sequence

SEQ ID NO: 35054 - DNA, 260 bp, Unknown
  Description of Unknown: RightRegion for integrase B9055 sequence
attgtaaaagagataaaaatatcccccaacgaatttgtggaggatattatatttttttagtttttgttatacagtaactagccgtaaccaccgggttaaaaccagttactgtataacaaaatattaaaaataaaggagatacagttacattatacagaaagaaagaggacgtttcaagcgccctcttttatttttcgcaaaaccgaacgatattcacgcggatacattgcttctatggctttcatgtgttcgtcaagtac

SEQ ID NO: 35055 - DNA, 260 bp, Unknown; identical to SEQ ID NO: 35006
  Description of Unknown: RightRegion for integrase B9056 sequence

SEQ ID NO: 35056 - DNA, 260 bp, Unknown
  Description of Unknown: RightRegion for integrase B9057 sequence
attgtaaaagaaataaaaatatcccccaatgagtttgtggaggatattatatttttttagttttagttatatagtaactgaccgcaaccaccgggttaaaacaagttactgtataacaaaatattaaaaataaaagagatacagttacattatacagaataaaagaggacgtttcaaccgccctcttttatttttcgcaaaactgaccgatattcacgcgggtacattgcttctattgctttcatgtgttcatcaagtac

SEQ ID NO: 35057 - DNA, 260 bp, Unknown; identical to SEQ ID NO: 35025
  Description of Unknown: RightRegion for integrase B9058 sequence

SEQ ID NO: 35058 - DNA, 145 bp, Unknown
  Description of Unknown: RightRegion for integrase B9059 sequence
attgtaaaagaaataaaaatatcccccgacacttacgtggaggatattatatttttttagtttttgttatacagtaactagccgtaaccacctgcttcgggtccccttgaaactgctgtctgaactgttgaaactgctgtatcat

SEQ ID NO: 35059 - DNA, 260 bp, Unknown
  Description of Unknown: RightRegion for integrase B9060 sequence
attgtaaaagaaataaaaatatcccccgacacttacgtggaggatattatatttttttagtttttgttatacagtaactagccgtaaccgccaggttaaggtcagttaccgtataacaaaatatgatagaaataaaggagaagtaattatattatacaagaagaaagaggacgtttcaagcgccctcttttatttttcgcaaaactgaccgatattctcgcggatacattgcttctatagctttcatgtgttcgtcaagc

SEQ ID NO: 35060 - DNA, 96 bp, Unknown
  Description of Unknown: RightRegion for integrase B9061 sequence
attgtaaaagaaataaaaatatcccccgacacttacgtggaggatattatatttttttagtttttgttatacagtaactagccgtaaccaccaggt

SEQ ID NO: 35061 - DNA, 260 bp, Unknown
  Description of Unknown: RightRegion for integrase B9062 sequence
attatacgggaaatccctgtgaacaacggcgctgtatcaggcgatccgatttttttataattttccgttgtactttctatgcgtgtgacaccaacgccacgaagaacacggccgccgcgctgccggatgttatccgctggttcaaaaatgcaggctaccgattcgataccgtggaccatctggaaaaaaagccgtaaccgccgccgtcgccccgcctgctgtggacaaaatacggccggaatatgaaaaaaatgcaaatt

SEQ ID NO: 35062 - DNA, 260 bp, Unknown; identical to SEQ ID NO: 35012
  Description of Unknown: RightRegion for integrase B9063 sequence

SEQ ID NO: 35063 - DNA, 260 bp, Unknown
  Description of Unknown: RightRegion for integrase B9064 sequence
acagtagacagaatagaccttgatgaggataatacgccgagaattacctttctttcgtaatttgcagtaatcaaattatccgtcaggttacttattttactatgaataaaaatagacccctcgtaatgaggggtctatctgtttaaaagtatctttttatgaaggcgatccgttcggcgacttcgtcctggtcgcagccatcagcggccgcttcttcaatgacgttttggaaaatcgccgcgatttcatcggtgaagttc

SEQ ID NO: 35064 - DNA, 260 bp, Unknown
  Description of Unknown: RightRegion for integrase B9065 sequence
attgtaaaagaaataaaaatatcccccaacgaatttgtggaggatattatatttttttagtttttgttatgcagtaactagccgtaaccaccatgtagcatatgtcgaaaatttataacctttacgataatcaaacttctctacggctttaattagaccaagatttccttcctgtatcagatcaagaaactgcattcctcttccggaatagcgtttggcaatgcttacggtgaggcgaagattcgcttcagacaatttct

SEQ ID NO: 35065 - DNA, 260 bp, Unknown
  Description of Unknown: RightRegion for integrase B9066 sequence
attgtaaaagaaataaaaatatcccccaacgaatttgtggaggatattatatttttttagttttagttatatagtaactgaccgcaaccaccaggttaaggtcagttaccgtataacaaaatatgatagaaataaaggagaagtaattatattatacaagaagaaagaggacgtttcaagcgccctcttttatttttcgcaaaactgaccgatattcacgtgggtacattgcttcgatggctttcatgtgttcgtcaagc

SEQ ID NO: 35066 - DNA, 133 bp, Unknown
  Description of Unknown: RightRegion for integrase B9067 sequence
accgttgacagaatcgacctcgatgaagatgatacgccgagaattaccttcctttcttaatttgtagtaatagaattagccgtcaggaagcttgggctcgaattgcagatatgccttaccgtttgtatccttt

SEQ ID NO: 35067 - DNA, 260 bp, Unknown
  Description of Unknown: RightRegion for integrase B9068 sequence
attgtaaaagaaataaaaatatcccccaacgaatttgtggaggatattatatttttttagtttttgttatgcagtaactagccgtaaccaccgggttaaaactagttactgtataacaaaatattaaaaataaaggagatacacttacattatacagaaagaaagaggacgtttcaagcgccctcttttatttttcgcaaaactgaccgatattctcgcggatacattgcttctatggctttcatgtgttcgtcaagtac

SEQ ID NO: 35068 - DNA, 260 bp, Unknown
  Description of Unknown: RightRegion for integrase B9069 sequence
attgtaaaagaaataaaaatatcccccaacgaatttgtggaggatattatatttttttagtttttgttatatagtaactagccgcaaccaccaggttaaaactagttactgtataacaaaatattaaaaataaaggagatacacttacattatacagaaagaaagaggacgtttcaagcgccctcttttatttttcgcaaaactgaccgatattctcgcggatacattgcctctatggctttcatatgttcgtctagtac

SEQ ID NO: 35069 - DNA, 260 bp, Unknown
  Description of Unknown: RightRegion for integrase B9070 sequence
attgtaaaagaaataaaaatatcccccgacacttacgtggaggatattatatttttttagtttttgttatacagtaactagccgtaaccaccaggttaaggtcatttaccgtataacaaaatatgatagaaataaaggagaagtaattatattatacaagaagaaagaggacgtttcaagcgccctcttttatttttcgcaaaactgaccgatattctcgcggatacattgcttcgatggctttcatgtgttcgtcaagc

SEQ ID NO: 35070 - DNA, 260 bp, Unknown; identical to SEQ ID NO: 35002
  Description of Unknown: RightRegion for integrase B9071 sequence

SEQ ID NO: 35071 - DNA, 260 bp, Unknown
  Description of Unknown: RightRegion for integrase B9072 sequence
attgtaaaagaaataaaaatatcccccaacgaatttgtggaggatattatatttttttagtttttgttatgcagtaactagccgtaaccaccgggttaaaaccagttactgtataacaaaatattaaaaataaaggagatacagttacattatacagaaagaaagaggacgtttcaagcgccctcttttatttttcgcaaaaccgaacgatattcacgcggatacattgcttctatggctttcatgtgttcgtcaagcac

SEQ ID NO: 35072 - DNA, 260 bp, Unknown; identical to SEQ ID NO: 35052
  Description of Unknown: RightRegion for integrase B9073 sequence

SEQ ID NO: 35073 - DNA, 260 bp, Unknown
  Description of Unknown: RightRegion for integrase B9074 sequence
attgtaaaagaaataaaaatatcccccgacacttacgtggaggatattatatttttttagtttttgttatgcagtaactagccgtaaccaccgggttaaaaccagttactgtataacaaaatattaaaaataaaggagatacacttacattatacagaaagaaagaggacgtttcaagcgccctcttttatttttcgcaaaaccgaacgatattctcgcggatacattgcttctatggctttcatgtgttcgtcaagcac

SEQ ID NO: 35074 - DNA, 260 bp, Unknown; identical to SEQ ID NO: 35035
  Description of Unknown: RightRegion for integrase B9075 sequence

SEQ ID NO: 35075 - DNA, 260 bp, Unknown
  Description of Unknown: RightRegion for integrase B9076 sequence
attgtaaaagaaataaaaatatcccccaacgaatttgtggaggatattatatttttttagttttagttatatagtaactgaccgcaaccaccaggttaaggtcagttaccgtataacaaaatatgatagaaataaaggagaagtaattatattatacaagaagaaagaggacgtttcaagcgccctcttttatttttcgcaaaactgaccggtattctcgcggatacattgcttcgatggctttcatgtgttcgtcaagt

SEQ ID NO: 35076 - DNA, 260 bp, Unknown; identical to SEQ ID NO: 34997
  Description of Unknown: RightRegion for integrase B9077 sequence

SEQ ID NO: 35077 - DNA, 141 bp, Unknown
  Description of Unknown: RightRegion for integrase B9078 sequence
attgtaaaagaaataaaaatatcccccgacacttacgtggaggatattatatttttttagtttttgttatacagtaactagccgtaaccaccaggttaaggtcagttaccgtataacaaaatatgatagaaataaaggaga

SEQ ID NO: 35078 - DNA, 260 bp, Unknown
  Description of Unknown: RightRegion for integrase B9079 sequence
attgtaaaagaaataaaaatatcccccaacgaatttgtggaggatattatatttttttagtttttgttatacagtaactagccgtaaccaccgggttaaaaccagttactgcataacaaaatattaaaaataaaggagatacagttacattatacagaaagaaagaggacgtttcaagcgccctcttttatttttcgcaaaaccgaacgatattctcgcgggtacattgcttctatagctttcatgtgttcgtctagtac

SEQ ID NO: 35079 - DNA, 260 bp, Unknown; identical to SEQ ID NO: 35054
  Description of Unknown: RightRegion for integrase B9080 sequence

SEQ ID NO: 35080 - DNA, 260 bp, Unknown; identical to SEQ ID NO: 35028
  Description of Unknown: RightRegion for integrase B9081 sequence

SEQ ID NO: 35081 - DNA, 260 bp, Unknown
  Description of Unknown: RightRegion for integrase B9082 sequence
attgtaaaagaaataaaaatatcccccgacacttacgtggaggatattatatttttttagtttttgttatacagtaactagccgaaaccaccaggttaaggtcagttaccgtataacaaaatatgatagaaataaaggagaagtaattatattatacaagaagaaagaggacgtttcaagcgccctcttttatttttcgcaaaaccgaacgatattcacgcggatacattgcttctatggctttcatgtgttcgtcaagt

SEQ ID NO: 35082 - DNA, 260 bp, Unknown
  Description of Unknown: RightRegion for integrase B9083 sequence
acagtagatagaatcgacctggatgaagacaacacgccgagaattaccttcctttcctaatttgcagtagtacaactagccgtcaggttagttattttacttcaaataaaaaaagacccctcgttgtgaggggtctatgtcggttatcgtgtgtagtagtcgtcgcctttatgttcggcaaccaccttgccgaatccgtcaatcacttgagttgcgaagttcgttgttccttcttctttatcgacttccaattggttctg

SEQ ID NO: 35083 - DNA, 260 bp, Unknown
  Description of Unknown: RightRegion for integrase B9084 sequence
ataatcagtaagattgaatttgtaaatgattatagattttatattcatttaaaattttagaggtgtaagtatgatattatataaaaagataggtatagataacttaaacaaacttaaccagggaatttattataaagttaaaaagaataagaaagttgcattaaatattatagggaaatatattgatttgaaaagtatagattattcttatgatgattataaattagattatcctgaaagaattgagggatatgctgaat

SEQ ID NO: 35084 - DNA, 260 bp, Unknown
  Description of Unknown: RightRegion for integrase B9085 sequence
attatacgggaaatccccgtgaacaacggcgctgtatcaggcgacccgatttttttataatttgccgttgtactttctacgtgcgtgacaccaacgccacaaagaacacggccgccgcgctgccggacgtcatccgctggttcaaaaacgcaggctaccgctttgacaccgtggatcatttggaaaaaaagatataatccgcctttgtgcatgcctgctgtggacaaaatacggcccgaatatgaaaaaaatgcaaattt

SEQ ID NO: 35085 - DNA, 260 bp, Unknown; identical to SEQ ID NO: 35005
  Description of Unknown: RightRegion for integrase B9086 sequence

SEQ ID NO: 35086 - DNA, 260 bp, Unknown; identical to SEQ ID NO: 35027
  Description of Unknown: RightRegion for integrase B9087 sequence

SEQ ID NO: 35087 - DNA, 260 bp, Unknown; identical to SEQ ID NO: 35023
  Description of Unknown: RightRegion for integrase B9088 sequence

SEQ ID NO: 35088 - DNA, 260 bp, Unknown
  Description of Unknown: RightRegion for integrase B9089 sequence
attgtaaaagaaataaaaatatcccccgacacttacgtggaggatattatatttttttagtttttgttatacagtaactagccgaaaccaccaggttaaggtcagttactgtataacaaaatatgatagaaataaaggagaggtaattatattatacaagaagaaagaggacgtttcaagcgccctcttttatttttcgcaaaactgaccgatattctcgcggatacattgcttcgatggctttcatgtgttcgtcaagc

SEQ ID NO: 35089 - DNA, 260 bp, Unknown
  Description of Unknown: RightRegion for integrase B9090 sequence
acaataattgatcatattgttgtccataaagatgactcactcgatatttttttacgctagtaggcagtaaactacatgtacccatttggatacatttagtttactgctatttatgataaatattactttttgtcatgattttgtaagatttgatcgctacactattaatcaggaggtgataatatggaaatcgaaatcaagcctgaagatctatctttatttttagataagattgggcctaataatattaataggataga

SEQ ID NO: 35090 - DNA, 260 bp, Unknown; identical to SEQ ID NO: 35028
  Description of Unknown: RightRegion for integrase B9091 sequence

SEQ ID NO: 35091 - DNA, 260 bp, Unknown; identical to SEQ ID NO: 35052
  Description of Unknown: RightRegion for integrase B9092 sequence

SEQ ID NO: 35092 - DNA, 260 bp, Unknown
  Description of Unknown: RightRegion for integrase B9093 sequence
attgtaaaagaaataaaaatatcccccaacgaatttgtggaggatattatatttttttagtttttgttatatagtaactagccgtaaccaccaggtagcataggtagaaaatttatacccttttctgtagtcaaacttttctaccgctttgatcagtccaagattgccttcctgaatcaaatcaaggaactgcatccccctgccggaataccgcttggcaatacttaccgtaagtcgaagattggcttcggaaagcttct

SEQ ID NO: 35093 - DNA, 260 bp, Unknown
  Description of Unknown: RightRegion for integrase B9094 sequence
attgtaaaagaaataaaaatatcccccaacgaatttgtggaggatattatatttttttagtttttgttatgcagtaactagccgtaaccaccgggttaaaactagttactgtataacaaaatattaaaaataaaggagatacagttacattatacagaaagaaagaggacgtttcaagcgccctcttttatttttcgcaaaactgaccgatattctcgcgggtacattgcctctatggccttcatgtgttcgtctagtac

SEQ ID NO: 35094 - DNA, 260 bp, Unknown
  Description of Unknown: RightRegion for integrase B9095 sequence
attataaaagaaataaaaatatcccccgacacttacgtggaggatattatatttttttagtttttgttatacagtaactagccgtaaccaccaggttaaggtcagttaccgtataacaaaatatgatagaaataaaggagaagtaattatattatacaagaagaaagaggacgtttcaagcgccctcttttatttttcgcaaaactgaccgatattctcgcggatacattgcttcgatggctttcatgtgttcgtcaagc

SEQ ID NO: 35095 - DNA, 260 bp, Unknown
  Description of Unknown: RightRegion for integrase B9096 sequence
attgtaaaagaaataaaaatatcccccgacacttacgtggaggatattatatttttttagtttttgttatacagtaactagccgtaaccaccagattaaagctagttactacataactaaatattaaaaataaaggagatacagttacattatacaagaagaaagaggacgtttcaagcgccctcttttatttttcgcaaaactgaccgatattcacgcgggtacattgcttcgatggctttcatgtgttcgtcaagcac

SEQ ID NO: 35096 - DNA, 260 bp, Unknown
  Description of Unknown: RightRegion for integrase B9097 sequence
attgtaaaagaaataaaaatatcccccgacacttacgtggaggatattatatttttttagtttttgttatacagtaactagccgaaaccaccaggttaaggtcagttaccgtataacaaaatatgatagaaataaaggagaagtaattatattatacaagaagaaagaggacgtttcaagcgccctcttttatttttcgcaaaactgaccgatattctcgcggatacattgcttcgatggctttcatgtgttcgtcaagt

SEQ ID NO: 35097 - DNA, 260 bp, Unknown
  Description of Unknown: RightRegion for integrase B9098 sequence
attgtaaaagaaataaaaatatcccccaacgaatttgtggaggatattatatttttttagtttttgttatgcagtaactagccgtaaccaccgggttaaaaccagttactgtataacaaaatattaaaaataaaggagatacacttacattatacagaaagaaagaggacgtttcaagcgccctcttttatttttcgcaaaactgaacgatattctcgtgggtacattgcttctatggctttcatatgttcgtcaagcac

SEQ ID NO: 35098 - DNA, 260 bp, Unknown
  Description of Unknown: RightRegion for integrase B9099 sequence
attgtaaaagaaataaaaatatcccccaacgaatttgtggaggatattatatttttttagtttttcttatacagtaactagccgtaaccaccgggttaaaaccagttactgtataacaaaatattaaaaaataaaggagatacagttacattatacagaaagaaagaggacgtttcaagcgccctcttttatttttcgcaaaaccgaacgatattctcgcggatacattgcttctatggctttcatgtgttcgtcaagta

SEQ ID NO: 35099 - DNA, 260 bp, Unknown
  Description of Unknown: RightRegion for integrase B9100 sequence
attgtcaaagaaatcaaaatataccctgataggcacatagaatattccttaaatgtttgaaaaatttttaatgaattttattacttaatatttctccctctgtagttgcgataatattatgtaataaaatccccgccctcataagagagcggggactatcatcagtgcttcacgacaaactcatagtaccgagcgagtttgtccggagcggcgtcctggtcgtccagaaacgctttcgcaatttcggcatagaagtcgat

SEQ ID NO: 35100 - DNA, 260 bp, Unknown
  Description of Unknown: RightRegion for integrase B9101 sequence
cgtaccatcaggcgcattgagattgatggtaagaaggtgtctaaggtattttttctataattttttatcctttctgttgctattatgtcaccttgccacttgtaatagtaacataatagcaactagttaaataatatcaataaaaacaccgatttggtgcaaatatatgctttgcaaagtaccgaatcggtgctatactatagtcatagcaaagaaaggagctaccaaaggtagtaaggtaaaggaaaatgaagagagaa

SEQ ID NO: 35101 - DNA, 260 bp, Unknown
  Description of Unknown: RightRegion for integrase B9102 sequence
actgtagatagaatagacattgatgaagacgatagaccgagaattacatttatttcttaattcgtagtagattaactatccgtcaggaagcttgggctcgaattgcagatatgccttaccgtttgtatcctttgtagccaaagcggccaccgtttcgggatatttccctttatcgatttcatacaatgccgccgcattatcaatcgtccggatatccgcactgatttttgctattttcgccgtctttccggcagacataa

SEQ ID NO: 35102 - DNA, 260 bp, Unknown; identical to SEQ ID NO: 35028
  Description of Unknown: RightRegion for integrase B9103 sequence

SEQ ID NO: 35103 - DNA, 260 bp, Unknown
  Description of Unknown: RightRegion for integrase B9104 sequence
attgtaaaagagataaaaatatcccccaacgaatttgtggaggatattatatttttttagtttttgttatatagtaactagccgtaaccaccaggtagcataggtagaaaatttatacccttttctgtagtcaaacttttctaccgctttgatcagtccaagattgccttcctgaatcaaatcaagaaactgcatccccctgccggaataccgcttggcaatacttaccgtaagtcgaagattggcttcggaaagcttct

SEQ ID NO: 35104 - DNA, 260 bp, Unknown
  Description of Unknown: RightRegion for integrase B9105 sequence
attgtaaaagaaataaaaatatcccccgacgaatttgtggaggatattatatttttttagtttttgttatgcagtaactagccgtaaccaccgggttaaaaccagttactgtataacaaaatattaaaaataaaggagatacagttagattatacagaataaaagaggacgtttcaagcgccctcttttatttttcgcaaaaccgaacgatattctcgtgggtacattgcttctatggctttcatatgttcgtcaagcac

SEQ ID NO: 35105 - DNA, 260 bp, Unknown
  Description of Unknown: RightRegion for integrase B9106 sequence
attgtaaaagaaataaaaatatcccccaacgaatttgtggaggatattatatttttttagtttttgttatgcagtaactagccgtaaccaccgggttaaaaccagttactgtataacaaaatattaaaaaataaaggagatacagttacattatacagaaagaaagaggacgtttcaagcgccctcttttatttttcgcaaaaccgaacgatattctcgcggatacattgcttctatggctttcatgtgttcgtcaagta

SEQ ID NO: 35106 - DNA, 260 bp, Unknown; identical to SEQ ID NO: 35103
  Description of Unknown: RightRegion for integrase B9107 sequence

SEQ ID NO: 35107 - DNA, 260 bp, Unknown
  Description of Unknown: RightRegion for integrase B9108 sequence
tgcatagacaagatcgtgattactgacggaaatatagacatctattttaatttgctatgatttccctttcctataatcgttccgatgatcattggagaaatccggaggttcatccgggacaataattcgatccgtgttagcaggtcacttcgtgatacggcatataaagccatttacgcgaaagaaaattatgtcaaagtaaaccagaaagaacctactgttcaggaaattgcagaggaaatcgggatcgcaaaggaaga

SEQ ID NO: 35108 - DNA, 260 bp, Unknown; identical to SEQ ID NO: 35054
  Description of Unknown: RightRegion for integrase B9109 sequence

SEQ ID NO: 35109 - DNA, 260 bp, Unknown
  Description of Unknown: RightRegion for integrase B9110 sequence
attatacgggaaatccccgtgaacaacggcgctgtatcaggcgacccgatttttttataattttccgttgtactttctatgtgcgtgacaccaacgccacgaagaacacggccgccgcgctgccggacgttatccgctggttcaaaaatgcaggctaccgattcgataccgtggaccatctgaaaaaaaagccgtaaccgccgccgccacccgcctgctgtggacaaaatacggccggaatatgaaaaaatgcaaatttt

SEQ ID NO: 35110 - DNA, 260 bp, Unknown
  Description of Unknown: RightRegion for integrase B9111 sequence
agagttgtgaggagaatcgagatcaagcgtcactcagtcgacaaggtgtactttgtttaaatttttgtgcaatttttttgtacttactttttgctattatgtcaccttgtcagatgtcatggtaacataatagcaataaaatattaaataatatcaatatatcacacaatacatgatatatttatcgctatacaagtcatacattgtatgatattatatagacataacaaagaaaggaaaccacaaagagtggttaaggt

SEQ ID NO: 35111 - DNA, 260 bp, Unknown
  Description of Unknown: RightRegion for integrase B9112 sequence
cgaaatgtccttgattctgtccacgtttcccctgatggaatagaagtcttcttcaagtaaaaagcagacatttctgtctgcaatttactaggagaatttcatgcccaatgtcaacaaagcccatctataatatacatcaatcaatcaccgaatgcaaacggtgattttttctttactaacatacgctgacctgtaggctatgacaagttagtatagaattttgcaaataaaaaaaaccaccttttcggtgatcttattca

SEQ ID NO: 35112 - DNA, 260 bp, Unknown
  Description of Unknown: RightRegion for integrase B9113 sequence
cgaaatgttcttgattctgtccatgtttcacctgatggaatagaagttttcttcaagtaaaaagcagacatttctgcctgccgattactaggagaatttcatgcccaaatgtcaactaaaccctacgcctataatatacaccaatcaatcacctaatgcaaacggtgattttttctttactaacatatgctaacctgtaggctatgacaagttagtatagaaatttgcaaataaaaaaaagcagatgcttcgcatccacc

SEQ ID NO: 35113 - DNA, 260 bp, Unknown
  Description of Unknown: RightRegion for integrase B9114 sequence
cgcaatgtccttgattctgtacatgtttcccctgatggaatagaagtttttttcaagtaaaaagcagacatttctgcctgccgtttactaggagaatttcatgcccaaatgtcaactaaaccctacgcctataatatacaccaatatatcaccgaatgcaaacggtgattttttctttactaacatattctaacctgtaggctatgacaagttagtatagaattttgcaaataaaaaaacagcccaccgaaaactccgac

SEQ ID NO: 35114 - DNA, 260 bp, Unknown
  Description of Unknown: RightRegion for integrase B9115 sequence
cgaaatgtccttgattctgtccatgtttcacctgacaaaataaaagttttcttcaagtaaaaagcagacattcctgcctgccgtttactaggagaatttcatgcccaaatgtcaactaaaccctacgcctataatatacaccaaacaatcaccgaatgcaaacggtgatttttttcttcactaacattatgtaacctgtaggctatgacaagttagtatagaattttgcataaaaaaaaacagcccgccgaatacccccg

SEQ ID NO: 35115 - DNA, 260 bp, Unknown
  Description of Unknown: RightRegion for integrase B9116 sequence
cgcaatgttcttgattctgtccacgtttcacctgacaaaatagaagttttcttcaagtaaaaagcagacatttctgtctgccctttactaggagaattttatgatcaatgtaaacgaaagtacatctataatatacaccaatcaatcaccgaatgcaaacggtgattttttctttactaagatatactaacctgtaggctatgacaagttagtatagaattttgcaaataaaaaaacagcccgccgaaaaccgacaggct

SEQ ID NO: 35116 - DNA, 260 bp, Unknown
  Description of Unknown: RightRegion for integrase B9117 sequence
cgaaatgttcttgattctgtccatgtttcacctgacaaaatagaagtttttttcaagtaaaaagcagacatttctgtctgccatttactaggagaatttcatgcccaatgtcaacaaaaccacacctataatatacatcaatcaatcaccaaatgcaaacggtgatttttttctttactaacattatgtggcctgtaggctatgacaagttagtatagaattttgcaaataaaaaaaaccacctttcggtgatcttattc

SEQ ID NO: 35117 - DNA, 260 bp, Unknown
  Description of Unknown: RightRegion for integrase B9118 sequence
cgaaatgtccttgattcagtccatgtttcccctgatggaatagaaatttttttcaagtaaaaagcagacatttctgtctgcaatttactaggagaatttcatgccctaatgtcaacaaagcccatctataatatacatcaatcaatcaccgaatgcaaacggtgatttttttctttactaacatggtttgacctgtaggttatggtaagttagtatagaattttatgcataaaaaaacagcccgtcgaatacccccgaca

SEQ ID NO: 35118 - DNA, 260 bp, Unknown
  Description of Unknown: RightRegion for integrase B9119 sequence
attataaaagagataaaaatatcccccaacgaatttgtggaggatattatatttttttagtttttgttatgcagtaactagccgtaaccaccaggttaaggtcagttaccgtataacaaaatatgatagaaataaaggagaagtaattatattatacaagaagaaagaggacgtttcaagcgccctcttttatttttcgcaaaactgaccgatattctcgcggatacattgcttcgatggctttcatgtgttcgtcaagc

SEQ ID NO: 35119 - DNA, 260 bp, Unknown
  Description of Unknown: RightRegion for integrase B9120 sequence
attataaaagagataaaaatatcccccaacgaatttgtggaggatattatatttttttagtttttgttatgcagtaactagccgtaaccaccaggtagcataggtagaaaatttatacccttttctgtagtcaaacttttctaccgctttgatcagtccaagattgccttcctgaatcaaatcaagaaactgcatccccctgccggaataccgcttggcaatacttaccgtaagtcgaagattggcttcagaaagcttct

SEQ ID NO: 35120 - DNA, 260 bp, Unknown
  Description of Unknown: RightRegion for integrase B9121 sequence
cgaaatgtccttgattctgtcaacgtttcccctgatggaatagaagttttcttcaagtaaaaagcaggcatttctgcctgccctttactaggagaaatatatgtacaaatagtaaccagacccatctacaatatacatcaatcaatcaccgaatgcaaacggtgattttttctttactaacatacgccgacctgtaggctatgacaagttagtatagaattttatgcataaaaaatcagcccgcaggaacccctgacagg

SEQ ID NO: 35121 - DNA, 260 bp, Unknown
  Description of Unknown: RightRegion for integrase B9122 sequence
cgcaatgttcttgattctgtccatgtttcacctgatggaatagaagttttcttcaagtaaaaagcagacatttctgcctgccgtttactaggagaatttcatgcccaatgtcaacaaaaccacacctataatatacatcaatcaatcaccgaatgcaaacggtgatttttttctttactaacattatgtgacctgtaggctatgacaagttagtatagaattttttgcataaaaaaacagcccgccgaaaacctccgaca

SEQ ID NO: 35122 - DNA, 260 bp, Unknown
  Description of Unknown: RightRegion for integrase B9123 sequence
agagtcgtgaggaaaatcgagatcaagcgccactcagtcgacaaggtgtactttgtttaaatttttgtgcaatttttttgtacttactttttgctattatgtcaccttgtcagatgtcatggtaacataatagcaataaaatattaaataatatcaatatatcacacaatgcatgatatatttatcactatacaagtcatacattgtatgatattatatagacataacaaagaaaggaaaccacaaagagtggttaaggt

SEQ ID NO: 35123 - DNA, 260 bp, Unknown
  Description of Unknown: RightRegion for integrase B9124 sequence
agaaatgttcttgattctgtcaacgtttcacctgatggaatagaagttttcttcaagtaaaaagcagacatttctgcctgccgattactaggagaatttcatgcccaaatgtcaactaaaccctacgcctataatataccccaagcaatcaccgaatgcaaacggtgattttttctttactaacataggctaacctgtaggctatgacaagttagtatagaattttgcaaataaaaaaacattgcatactaccaatacgc

SEQ ID NO: 35124 - DNA, 260 bp, Unknown
  Description of Unknown: RightRegion for integrase B9125 sequence
cgcaatgtccttgattctgtccatgtttcacctgacaaaatagaagttttcttcaagtaaaaagcagacatttctgcctgccctttactaggagaatttatgaccaatttcaacgaaattacatctataatatacatcaatcaatcaccgaatgcaacggtgattttttctttactaacatatactaacctgtaggctatgacaagttagtatagaattttgcaaataaaaaaaacagcccgccgaatacctccgacaag

SEQ ID NO: 35125 - DNA, 260 bp, Unknown
  Description of Unknown: RightRegion for integrase B9126 sequence
cgaaatgttcttgattctgtccatgtttcacctgatggaatagaagttttcttcaagtaaaaagcagacatttctgcctgccgattactaggagaatttcatgcccaaatgtcaactaaaccctacgcctataatatacaccaatcaatcacctaatgcaaacggtgatttttttctgtactaacattatgtgacctgtaggctatgacaagttagtatagaaatttgcaaataaaaaaaagcagatgcttcgcatccac

SEQ ID NO: 35126 - DNA, 260 bp, Unknown
  Description of Unknown: RightRegion for integrase B9127 sequence
cgcaatgttcttgagtctgtacatgtttcacctgacaaaatagaagttttcttcaagtaaaaagcagacatttctgcctgccctttactaggagaattataccaatgaaaaaatacatctataatatactccaatcaatcaccgaatgcaaacggtgattttttctttactaacattatgcgacctgtaggctatgacaagttagtatagaattttgcaaataaaaaaacagcccgccgaaaaccgacaggctgagaaag

SEQ ID NO: 35127 - DNA, 260 bp, Unknown
  Description of Unknown: RightRegion for integrase B9128 sequence
agagttgtgaggagaatcgagatcaagcgtcactcagtcgacaaggtgtactttgtttaaatttttgtgcaatttttttgtacttactttttgctattatgtcaccttatcacttgtcatggtaacataatagcaaaaaatatcaataaaaagcactgatttagtgcaaatatatactttacaaagcactgaatcggtgctatactatagtcatagcaaagaaaggaactgccaaatgtagtaaggtaaagagaaatgaa

SEQ ID NO: 35128 - DNA, 260 bp, Unknown
  Description of Unknown: RightRegion for integrase B9129 sequence
ggaatacttgattgtattactgtagatagtcagaatagaatccaaatattctatcgataattttttatttacattaatatatccccttgaatattaactttaagtctagtatttttcactaattatgttacaatagatagcaacaaaaacatcgaaatcttttttaaataacattgtattatctccacttccactgtcgcagtcttcggaacaattataacactatataccaatttcaactccacggagcaagataaata

SEQ ID NO: 35129 - DNA, 260 bp, Unknown
  Description of Unknown: RightRegion for integrase B9130 sequence
cgcaatgttcttgattctgtccacgtttcacctgacaaaatagaagttttcttcaagtaaaaagcagacatttctgcctgctctttactaggagaatttatgaccaatgtcaacgaaaatacatctataatatacaccaataagtcaccgaatgcaaacggtgattttttctttactaagatatgctaacctgtaggatatgacaagttagtatagaatttttcaaataaaaaaacagcccgccgaaaaccgacaggctg

SEQ ID NO: 35130 - DNA, 260 bp, Unknown; identical to SEQ ID NO: 35118
  Description of Unknown: RightRegion for integrase B9131 sequence

SEQ ID NO: 35131 - DNA, 260 bp, Unknown
  Description of Unknown: RightRegion for integrase B9132 sequence
cgcaacatccttgattctgtacatgtttcacctgatggaatagaagtttttttcaagtaaaaagcagacatttctgcctgccatttactagaagaacgatatatacagatttcaatcaaactgcatctataatatacaccaatcaatcaccgaatgcaaacggtgattttttctttactaacattatgtaacctgtaggctatggcaagttagtatagaattttgcataaaaaaatcagcccgccgaaatgacacgacag

SEQ ID NO: 35132 - DNA, 260 bp, Unknown
  Description of Unknown: RightRegion for integrase B9133 sequence
ttaaaaaaaatctccatcgaggatgatggagagataaattttaccgtcagtgtaccataatttactgttagggtgctcatagtaaaatatagtataatgcataattcgataaggtgactacaaaacgtagtcaccttatcacttactcaactattgcgtggtagtagttggccagcttctcagttggcccgcctccatcccggtcaaacaaaaaggctttcgccatttcgccgtaaaaatccggtttgctacatccgctt

SEQ ID NO: 35133 - DNA, 260 bp, Unknown
  Description of Unknown: RightRegion for integrase B9134 sequence
cgaaatgttcttgattctgtccatgtttcacctgacaaaatagaagttttcttcaagtaaaaagcagacatttctgcctgccctttactaggagaatttatgaccaatgtcaacgaaaatacatctataatatacaccaataagtcaccgaatgcaaacggtgattttttctttactaacattatgtgacctgtaggatataacaagttagtatagaattttgcaaataaaaaaacagcccgtcgaaaacctacgacagg

SEQ ID NO: 35134 - DNA, 260 bp, Unknown
  Description of Unknown: RightRegion for integrase B9135 sequence
cgcaatgtccttgattctgtccatgtttcacctgatggaatagaaatttttttcaagtaaaaagcagacatttctgcctgccatttactaggagaatttcatgccataatgtcaactaaaccctacgcctataatatacatcaatcaatcaccgaatgcaaacggtgattttttttcttcactaacattatgtaacctgtaggctatgacaagttagtatagaattttttgcataaaaaagcagcccgccgaatactccc

SEQ ID NO: 35135 - DNA, 260 bp, Unknown; identical to SEQ ID NO: 35123
  Description of Unknown: RightRegion for integrase B9136 sequence

SEQ ID NO: 35136 - DNA, 260 bp, Unknown
  Description of Unknown: RightRegion for integrase B9137 sequence
agagttgtgaggagaatcgagatcaagcgtcactcagtcgacaaggtgtactttgtttaaatttttgtgcaatttttttgtgcttactttttgctattatgtcaccttgccactatttatcgtatacccaaataacgaatatatcgtatccatcttgccgcggctccacgcaacctcaatagcatgacgcagggcacgctctacacggcttggtgttgttatatatttcttagcgattgacggatacaatgcctttgtga

SEQ ID NO: 35137 - DNA, 260 bp, Unknown
  Description of Unknown: RightRegion for integrase B9138 sequence
cgaaatgtccttgattctgtccacgtttcccctgatggaatagaagtcttcttcaagtaaaaagcagacatttctgtctgcaatttactaggagaatttcatgcccaatgtcaacaaagcccatctataatatacatcaatcaatcaccgaatgcaaacggtgattttttctttactaacatgcgctgacctgtaggctatgacaagttagtatagaattttttgcataaaaaaacagcccgccgaatacccccgacaag

SEQ ID NO: 35138 - DNA, 260 bp, Unknown
  Description of Unknown: RightRegion for integrase B9139 sequence
cgaaatgtacttgattctgttcacgtttcccctgatggaatagaagttttcttcaaataaaaagcagacatttctgcctgccctttaatagaagaacgatatacagatatcaaattctgcacctataatatacaccaatcaatcaccgaatgcaaacggtgattttttctttactaacattatgtggcctgtaggctatgacaagttagtatagaattttacgcataaaaaaagcccgccgaacactccgacaggctaaa

SEQ ID NO: 35139 - DNA, 260 bp, Unknown
  Description of Unknown: RightRegion for integrase B9140 sequence
atctctgagattagattagtaaataattttagatgtgttgtgataaccactatcttctaaggagcaactatgattttatatgaaaagattttagataggtattcaagaacagagttaaataaaatattagatcctagattagcaaggaaaatatactacaataggggaattattccccttggaaaaatatctaaattaatctcttttgatgaaattggttataatgttgaagatgcagttattgattattctttagataa

SEQ ID NO: 35140 - DNA, 260 bp, Unknown
  Description of Unknown: RightRegion for integrase B9141 sequence
cgaaatgttcttgattctgtccatgtttcacctgatggaatagaagttttcttcaagtaaaaagcagacatttctgtctgccatttactaggagaatttcatgccataatgtcaactaaacccacctataatatacatcaatcaatcaccgaatgcaaacggtgatttttttctttactaacattatgtgacctgtaggctatgacaagttagtatagaattttgcataaaaaaaaaacagcccgccgaatacccccgac

SEQ ID NO: 35141 - DNA, 260 bp, Unknown
  Description of Unknown: RightRegion for integrase B9142 sequence
cgaaatgtccttgattctgtccacgtttcacctgatggaatagaagtttttttcaagtaaaaagcagacatttctgcctgccgattactaggagaatttcatgcccaaatgtcaactaaaccctacgcctataatatacaccaatatatcaccgaatgcaaacggtgatatttttctgtactaacatacgctaacctgtaggctatgacaagttagtatagaatttcacgcataaaaaaacagcccgccgaatacccccg

SEQ ID NO: 35142 - DNA, 260 bp, Unknown
  Description of Unknown: RightRegion for integrase B9143 sequence
agagttgtgaggagaatcgagatcaagcgtcactcagtcgacaaggtgtactttgtttaaatttttgtgcaatttttttgtacttgctttttgctattatgtcaccttgtcacttgtaatagtaacataatagcaaaaaattaaataatatcaataaaaacaccgatttggtgcaaatatatgctttacaaagtaccgaatcggtgctatattatagtcataacaaagaaaggaactaccaaaggtagtaaggtaaagga

SEQ ID NO: 35143 - DNA, 260 bp, Unknown
  Description of Unknown: RightRegion for integrase B9144 sequence
cgcaatgttcttgagtctgtccacgtttctcctgatggaatagaagttttcttcaagtaaaaagcagacatttctgcctgccctttactaggagaatttattaccaagaaattacatctataatatacaccaatcaatcaccgaatgcaaccggtgattttttctttactaagatatgctaacctgtaggctataacaagttagtatagaattttatgcataaaaaagcagcacgccgaaaacctccgacatgctgagaa

SEQ ID NO: 35144 - DNA, 260 bp, Unknown
  Description of Unknown: RightRegion for integrase B9145 sequence
cgcaacatccttgattctgtccatgtttcccctgatggaatagaagtttttttcaagtaaaaagcagacatttctgtctgccatttactaggagaatttcatgcccaaatgtcaactaaaccctacgcctataatatacaccaatcaatcacctaatgcaaacggtgattttttttctttactaacattgtatgacctgtaggctgtgacaagttagtatagaattttgcaaataaaaaaagcagatgctccgcatctac

SEQ ID NO: 35145 - DNA, 260 bp, Unknown
  Description of Unknown: RightRegion for integrase B9146 sequence
cgcaatgtccttgattctgtcaacgtttcacctgatggaatagaagttttcttcaaataaaaagcagacatttctgcctgccctttaatagaagaacgttatacagatatcaaattctgcatctataatatacaccaatcaatcaccgaatgcaaacggtgattttttctttactaacatatgcttacctgtaggctatgacaagttagtatagaaattcatgcataaaaaaatcagcccgccgaaacccccgacaggct

SEQ ID NO: 35146 - DNA, 260 bp, Unknown
  Description of Unknown: RightRegion for integrase B9147 sequence
gaaaagcgtaaacaggcaggtcagatttcaaaagagaggagatggcacagatgcccgtagtaaccaaaattccagcaaggctgcaccctgcgacctttgtacctcttgaaagcacagcaaaacgcaaggttgccggctatgcgagagtgtcgaccgattcggaggagcagcagacttcctacgcagcacaggtcagctattacacggattacattcagaaacgcctcgattgggattttgttggagtgtacacggatgag

SEQ ID NO: 35147 - DNA, 260 bp, Unknown
  Description of Unknown: RightRegion for integrase B9148 sequence
cgcaatgttcttgattctgtccacgtttctcctgacggaatagaagttttcttcaagtaaaaagcagacatttctgtctgccctttactaggagaatttatgtgccaatgtcaacgaaaatacatctataatatacaccaatcaatcaccgaatgcaaacggtgattttttctttactaagatatgctaacctgtaggctatgacaagttagtatagaatttttcaaataaaaaaacagcccgctgaaaacctccgacag

SEQ ID NO: 35148 - DNA, 260 bp, Unknown
  Description of Unknown: RightRegion for integrase B9149 sequence
cgcaatgttcttgattctgtccatgtttctcctgatggaatagaagttttcttcaagtaaaaagcagacatttctgtctgccctttactaggagaatttatgaccaatgtaaacgaaagtacatctataatatacaccagaaaatcgccgaatgcaaacggtgattttttctttactaagatattctagcctgtaggctatgataagttagtatagaattttgaaaataaaaaaacagcccgccgaaaaccgacaggctg

SEQ ID NO: 35149 - DNA, 260 bp, Unknown
  Description of Unknown: RightRegion for integrase B9150 sequence
cgaaatgttcttgattctgttcacgtttcccctgatggaatagaagttttcttcaagtaaaaaacaggcatttctgcctgccctttaatagaagaacgttatacagatatcaaattctgcacctataatatacaccaatcaatcaccgaatgcaaacggtgattttttctttactaacattatgtgacctgtaggctaacgcaagttagtatagaaatttatgcataaaaaaatcagcccaccgaaacgacacgacaggc

SEQ ID NO: 35150 - DNA, 260 bp, Unknown
  Description of Unknown: RightRegion for integrase B9151 sequence
cgaaatgtccttgattctgtccacgttttccctgataaaatagaagttttcttcaagtaaaaagcagacatttctgtctgccatttacaaggagaatttcatgtcctagtgccaacaaagctacatctataatatacaccaatcaatcaccgaatgcaaacggtgattttttctttactaacatgatgtgacctgtaggctatgacaagttagtatagaattttgcataaaaaaaacagcctgccgaaaacatccgacaa

SEQ ID NO: 35151 - DNA, 260 bp, Unknown
  Description of Unknown: RightRegion for integrase B9152 sequence
cgcaatgttcttgattctgtccacgtttcacctgatggaatagaagtttttttcaagtaaaaagcagacatttctgcctgccctttactaggagaatttatgaccaatgtaagccacatctataatatacaccaatcaatcaccgaatgcaaacggtgattttttctatactaacattatgtgacctgtaggctatgacaagttagtatagaattttgcaaataaaaaaacagcccgccgaatacctccgacaggctgag

SEQ ID NO: 35152 - DNA, 260 bp, Unknown
  Description of Unknown: RightRegion for integrase B9153 sequence
cgcaatgttcttgattctgtccatgtttcacctgacaaaatagaagttttctttaagtaaaaagcagacatttctgcctgccctttactaggagaatttatgaccaatgtcaacgaaaatacatctataatatacaccaataagtcaccgaatgcaaacggtgattttttctttactaagatatgctaacctgtaggctatgacaagttagtatagaatttttcaaataaaaaaacagcccgccgaaagcttcgacaggc

SEQ ID NO: 35153 - DNA, 260 bp, Unknown
  Description of Unknown: RightRegion for integrase B9154 sequence
cgcaacatccttgattctgtccatgtttcccctgatgggatagaagttttcttcaagtaaaaagcagacatttctgcctgccgattactaggagaatttcatgcctaaatgtcaactaaaccctacgcctataatatacaccaatcaatcacctaatgcaaacggtgatttttttctgtactaacatggtatgacctgtaggctatgacaagttagtatagaatttcatgcataaaaaaaacagcccgccgaataccccc

SEQ ID NO: 35154 - DNA, 260 bp, Unknown
  Description of Unknown: RightRegion for integrase B9155 sequence
cgaaatgtacttgattcagtccatgtttcacctgatggaatagaagttttcttcaaataaaaagcagacatttctgcctgccaactaaacccacctataatatacatcaatcaatcaccgaatgcaaacggtgattttttctttactaagatatactgacctgtaggctatgacaagttagtatagaattttgcatgaaaaaatcagcccgccgaaacgacacgacaggctgagaaaggaattttgtgatgaacatgaaa

SEQ ID NO: 35155 - DNA, 260 bp, Unknown
  Description of Unknown: RightRegion for integrase B9156 sequence
cgcaatgttcttgattccgtccatgtttcccctgacaaaatagaagttttcttcaaataaaaagcagacatttctgcctgccctttaatagaaggacgttatacagatatcaaattctgcacctataatatacgccaatcaatcaccgtttgcaaacggtgtttttttctttactaacattatgtgacctgtaggctatgacaagttagtatagaaattcatgcataaaaaaatcagcccgccgaaacgacacgacaggc

SEQ ID NO: 35156 - DNA, 260 bp, Unknown
  Description of Unknown: RightRegion for integrase B9157 sequence
cgcaacatccttgattctgtccatgtttcacctgatggaatagaagtttttttcaagtaaaaagcagacatttctgtctgccatttactaggagaatttcatgcccaaatgtcaactaaaccctacgcctataatatacaccaatcaatcacctaatgcaaacggtgatttttttctatactaacattatgtaacctgtaggctatgacaagttagtatagaattttgcgaataaaaaaaacagcctgccgaatacctcc

SEQ ID NO: 35157 - DNA, 260 bp, Unknown
  Description of Unknown: RightRegion for integrase B9158 sequence
cgcaatgtccttgagtctgtccatgtttcacctgatggaatagaagttttcttcaagtaaaaagcagacatttctgcctgccctttactaggagaattatatgtaccaatgaaaaaatacatctataatatactccaatcaatcaccgaatgcaagcggtgatttttttctttactaagatatgctaacctgtaggctatgacaagttagtatagaattttgcaaataaaaaaacagcccgccgaaaaccgacagactga

SEQ ID NO: 35158 - DNA, 260 bp, Unknown
  Description of Unknown: RightRegion for integrase B9159 sequence
cgcaatgttcttgattctgtccacgtttcacctgacaaaatagaagttttcttcaagtaaaaagcagacatttctgcctgccctttactaggagaatttatgaccaatgtaagccacatctataatatacatcaatcaatcaccgaatgcaaacggtgattttttctttactaagatatgctaacctgtaggctataacaagttagtatagaatttttcaaataaaaaaacagcccgccgaaaactccgacaggctgaga

SEQ ID NO: 35159 - DNA, 260 bp, Unknown
  Description of Unknown: RightRegion for integrase B9160 sequence
cgcaatgttcttgattctgtccacgtttcacctgacaaaatagaagttttcttcaagtaaaaagcagacatttctgtctgccctttactaggagaattttatgatcaatgtaaacgaaagtacatatataatatacaccaatcaatcaccgaatgcaaacggtgattttttctttactaagatatactaacctgtaggctatgacaagttagtatagaattttgcaaataaaaaaacagcccgccgaaaaccgacaggct

SEQ ID NO: 35160 - DNA, 260 bp, Unknown
  Description of Unknown: RightRegion for integrase B9161 sequence
aggtcactaaaactttataaaaagagaggagaggatggaagatggctaaaagaaaaataacggttattccttcaacaataaatcctttaacgcagaccccggttggtagcgttcaaaaaagaaaagttgcagcgtatgctcgtgtctcaactgatagcgatgagcaatatacctcttacgaaacacaaaaaacatattatgaaaattacataaaaagtaaacctgagtgggaatttgtaagagtatatgctgatgaagga

SEQ ID NO: 35161 - DNA, 260 bp, Unknown
  Description of Unknown: RightRegion for integrase B9162 sequence
cgaaatgtccttgattctgtccacgtttcccctgatgggatagaagttttcttcaagtaaaaagcagacatttctgcctgccgtttactaggagaatttcatacccaatgtcaacaaagcccatctataatatacatcaatcaatcaccgaatgcaaacggtgattttttctttactaacatgcgctgacctgtaggctatgacaagttagtatagaattttttgcataaaaaaacagcccgccgaatacccccaacaag

SEQ ID NO: 35162 - DNA, 260 bp, Unknown
  Description of Unknown: RightRegion for integrase B9163 sequence
agagttgtgaggagaatcgagatcaagcgtcactcagtcgacaaggtgtactttgtttaaatttttgtgcaatttttttgtacttactttttgctattatgtcaccttgtcacttgtcatggtaacataatagcaaaaaatatcaataaaaagcactgatttagtgcaaatatatactttacaaagcactgaatcggtgctatactatagtcatagcaaagaaaggaactgccaaatgtagtaaggtaaagagaaatgaa

SEQ ID NO: 35163 - DNA, 260 bp, Unknown
  Description of Unknown: RightRegion for integrase B9164 sequence
agagttgtgaggagaatcgagatcaagcgtcactcagtcgacaaggtgtacttcgtttaaatttttgtgcaatttttttgcacttactttttgctattatgtcaccttgtcagaatttatcgtataaccgaataacgaatatatcgtatccatcttgccgcggctccacgcaacctcaatcgcatgacgcagggcacgctctacacggcttggtgttgttacatatttcttagcgattgacggatacaatgcctttgtga

SEQ ID NO: 35164 - DNA, 260 bp, Unknown
  Description of Unknown: RightRegion for integrase B9165 sequence
cgcaatgtccttgattctgtacatgtttcccctgatggaatagaagttttcttcaagtaaaaagcagacatttctgcctgccgtttactaggagaatttcatgcccaaatgtcaactaaaccctacgcctataatatacaccaatatatcaccgaatgcaaacggtgattttttctttactaacatatgctaacctgtaggctatgacaagttagtatagaattttgcataaaaaaaacagcccgccgaatacccccgac

SEQ ID NO: 35165 - DNA, 260 bp, Unknown
  Description of Unknown: RightRegion for integrase B9166 sequence
cgaaatgtccttgattcagtccatgtttcccctgatgggatagaagtttttttcaagtaaaaagcagacatttctgcctgccgtttactaggagaatttcatgcccaaatgtcaactaaaccctacgcctataatatacaccaatcaatcaccgaatgcaaacggtgattttttctttactaagatatgttaacctgtatgctatgacaagttagtatagaatttcacgcataaaaaaacagcccgccgaatacccccga

SEQ ID NO: 35166 - DNA, 260 bp, Unknown
  Description of Unknown: RightRegion for integrase B9167 sequence
agagtcgtgaggagaatcgagatcaagcgtcactcagtcgacaaggtgtactttgtttaaatttttgtgcaatttttttgtgcttactttttgctattatgtcaccttgtcacttgtcatggtaacataatagtaaaaaatatcaataaaaagcactgattaagtgcaaatatatactttacaaagcactgaatcggtgctatactatagtcataacaaagaaaggaactgccaaaggtagtaaggtaaagggaaatgaa

SEQ ID NO: 35167 - DNA, 260 bp, Unknown
  Description of Unknown: RightRegion for integrase B9168 sequence
cgaaatgtccttgattctgtccacgtttcacctgatggaatagaagttttcttcaagtaaaaagcagacatttctgtctgcaatttactaggagaattttatgccctaatgtcaacaaagcctacatataatatacatcaatcaatcaccgaatgcaaacggtgatttttttctttactaacatagtttgacctgtaggttatggtaagttagtatagaattttatgcataaaaaaacagcccgccgaaaacctccgaca

SEQ ID NO: 35168 - DNA, 260 bp, Unknown
  Description of Unknown: RightRegion for integrase B9169 sequence
agagttgtgaggagaatcgagatcaagcgtcactcagtcgacaaggtgtactttgtttaaatttttgtgcaatttttttgtacttactttttgctattatgtcaccttgtcacttatcatagtaacataatagtaaaaaatatcaataaaaagcactgattaagtgcaaatatatgctttacaaagtaccaaatcggtgctatactatagccataacaaagaaaggaactgccaaaggtagtaaggtaaaatatggtgga

SEQ ID NO: 35169 - DNA, 166 bp, Unknown
  Description of Unknown: RightRegion for integrase B9170 sequence
agagttgtgaggagaatcgagatcaagcgtcactcagtcgacaaggtgtactttgtttaaatttttgtgcaatttttttgtacttactttttgctattatgtcaccttgtcacttatcatagtaacataatagtaaaaaatatcaataaaaagcactgattaagtg

SEQ ID NO: 35170 - DNA, 260 bp, Unknown
  Description of Unknown: RightRegion for integrase B9171 sequence
cgaaatgtacttgattctgtccacgtttcccctgatggaatagaagttttcttcaaataaaaagcagacatttctgcctgccctttaatagaagaacgatatatacagatttcaatcatactgcacctataatatacaccaatcaatcaccgaatgcaaacggtgattttttctttactaacattatgtgacctgtaggctatgacaagttagtatagaattttgcataaaaaaatcagcccgccgaaatccccgacagg

SEQ ID NO: 35171 - DNA, 260 bp, Unknown; identical to SEQ ID NO: 35134
  Description of Unknown: RightRegion for integrase B9172 sequence

SEQ ID NO: 35172 - DNA, 260 bp, Unknown
  Description of Unknown: RightRegion for integrase B9173 sequence
cgaaatgttcttgattctgtccatgtttcacctgacaaaatagaagttttcttcaagtaaaaagcagacatttctgcctgccctttactaggagaatttatgaccaatgtcaacgaaaatacatctataatatacaccaatcaatcaccgaatgcaaacggtgattttttctttactaagatatgctaacctgtaggctatgacaagttagtatagaatttttcaaataaaaaaacagcccgccgaacgctccgacaggc

SEQ ID NO: 35173 - DNA, 260 bp, Unknown
  Description of Unknown: RightRegion for integrase B9174 sequence
agagttgtgaggagaatcgagatcaagcgtcactcagtcgacaaggtgtacttcgtttaaatttttgtgcaatttttttgcacttactttttgctattatgtcaccttgtcagatatcatagtaacataatagtaaaaaatatcaataaaaagcactgattaagtgcaaatatatgctttacaaagtaccaaatcggtgctatactatagccataacaaagaaaggaactgccaaaggtagtaaggtaaaatatggtgga

SEQ ID NO: 35174 - DNA, 260 bp, Unknown
  Description of Unknown: RightRegion for integrase B9175 sequence
cgaaatgtccttgattctgtccatgtttcccctgatggaatagaagttttcttcaagtaaaaagcagacatttctgcctgccatttactaggagaatctatgaccaatgtcaacgaaaatacatctataatatacaccattcaatcaccgaatgcaaacggtgattttttctttactaacattatgcgacctgtaggctatgacaagttagtatagaattttgcaaataaaaaaaacagcccgccgaaaaccgacaggct

SEQ ID NO: 35175 - DNA, 260 bp, Unknown
  Description of Unknown: RightRegion for integrase B9176 sequence
cgaaatgtccttgattctgtccacgtttcccctgatggaatagaagttttcttcaagtaaaaagcagacatttctgtctgccatttactaggagaaatttatgccccaatgtcaacaaagcccacctataatatacatcaatcaatcaccgaatgcaaacggtgattttttctttactaacatggtttaacctgtaggctatgacaagttagtatagaattttttgcataaaaaaacagcccgccgaaaacctccggcgg

SEQ ID NO: 35176 - DNA, 260 bp, Unknown
  Description of Unknown: RightRegion for integrase B9177 sequence
cgaaatgtccttgattctgtccatgtttcccctgatgggatagaagtttttttcaagtaaaaagcagacatttctgcctgccgtttactaggagaatttcatgcccaaatgttaactaaaccctacgcctataatatacaccaatcaatcacctaatgcaaacggtgatttttttctgtactaacatggtatgacctgtaggctgtgacaagttagtatagaattttatgcataaaaaaacagcccgccgaatacccccg

SEQ ID NO: 35177 - DNA, 260 bp, Unknown
  Description of Unknown: RightRegion for integrase B9178 sequence
atagaagccatatatctcgatgagcacacgcataagatatccggcattaagttcttatagattagtgggtacagaaaaattacttacacagttgagtttgagccgcatgcgacacttctggaaaacgaaggtgccggttacgttgtaagctctcttggcattgagagcggatatgtaccatacactgcatactgtgcaaaaaaaagttatattaaaaatcacccggagataatacagtcatttacaaatgcaatacaaaa

SEQ ID NO: 35178 - DNA, 67 bp, Unknown
  Description of Unknown: RightRegion for integrase B9179 sequence
aaagataaaatcaaaatactctgtctcttatacacatctccgagcccacgagacgcgtagtaatctc

SEQ ID NO: 35179 - DNA, 260 bp, Unknown
  Description of Unknown: RightRegion for integrase B9180 sequence
tggcttgacggtttccgccacggggacagaaaaagcccagagttggacggatgctcgtaagacagtaattctaaaaaattactattttacggcatctgtctgacagggttggaaacatcaacgaaaagaacgatgtcgagtcgaaagacttagcatcgttcttttttatctcaaaatcattgaaattacggaggtttgctatgaagcgtcttttatcttgcgaatttaacatggataccgcctgtgtggagctgaagttc

SEQ ID NO: 35180 - DNA, 260 bp, Unknown
  Description of Unknown: RightRegion for integrase B9181 sequence
tcggtcattaaagaaattcaagtggataaagaacgaaatttccatattatttttttataatttttataccactaactagtattaacccgtcggttcatccgccagtaaaatcgcaggttttgccgctaaagctcttgcaatcgctactcgctgctgctgtccgccggataaagcatggggcagactttctaattttttccttatgcctaaagtagtaataatttcctccacatatcctttttcaatttttttcccatcca

SEQ ID NO: 35181 - DNA, 109 bp, Unknown
  Description of Unknown: RightRegion for integrase B9182 sequence
accataaaagagattcacttgaatgaagatttctctgtaaaatccgtggattttttatagagtgtcttgtactaactggtgaaccccaaatcctgttaccaagtctaat

SEQ ID NO: 35182 - DNA, 260 bp, Unknown
  Description of Unknown: RightRegion for integrase B9183 sequence
cgcttcatcaagcggattgatgcagacaacgatggcgcgtttttcgtaacgccgcgttaggcatattttaccttggcggacacaaagggtaagtatgcctaaaaatcccccgccgtaaatgacgggggattttttacctatcgagtttacgcatgacgctattgtagacgcgctcgttaacaactttcaaactgtccatcagttcgtccataaccgcccatgccacacttggctcaacagctgatacggcccgcagaaag

SEQ ID NO: 35183 - DNA, 260 bp, Unknown
  Description of Unknown: RightRegion for integrase B9184 sequence
cgcttcatcaggcggattgatgcagacaacgatggcgcgttttttgtaacaccgcgttaggcatattttaccttcatggacgcaaagggtaaatatgcctaaaaatcccccgccgtaaatgacgggggattttttcacttgtatagcttacgcatgacgctgttgtagacgcgctcgttaacaacttttaagctgtccatcagttcgtccatgattgcccatgccacacttggctcaacagatgatacagcctggaggaa

SEQ ID NO: 35184 - DNA, 260 bp, Unknown
  Description of Unknown: RightRegion for integrase B9185 sequence
cgcttcatcacgcggattgatgcagacaacgatggcgcgtttttcgtaacgccacgttaggcatattttaccttggcggacacaaagggtaagtatgcctaaaaatcccccgccgtaaatgacgggggattttttacctatcgagtttacgcatgacgctgttgtagacgcgctcgttaacaactttcaaactgtccatcagttcgtccataaccgcccatgcaacacttggctcaacagctgatacggcccgcagaaag

SEQ ID NO: 35185 - DNA, 260 bp, Unknown
  Description of Unknown: RightRegion for integrase B9186 sequence
cgcttcatcaagcggattgatgcagacaacgatggcgcgtttttcgtaacgccgcgttaggcatattttaccttggtggagttcaccgtgtacccgaagtacttctgcagcgtctccagatcgccccggtcccaggccacctcgatggcgtggcggatggcccgctccacgcggctgggcgtggtactgaaccgcttggccacctcggggtacagcaccttggtgacggcgttgatgacctccatgtcccccacggtgat

SEQ ID NO: 35186 - DNA, 260 bp, Unknown
  Description of Unknown: RightRegion for integrase B9187 sequence
cgcttcatcaagcggattgatgcagacaacgatggcgcgtttttcgtaacgccgcgttaggcatattttacctttgcggacacaaagggtaagtatgcctaataatcccccgccgtaaatgacgggggattttttacctatcgagtttacgcatgacgctgttgtagacgcgctcgttaacaactttcaaactgtccatcagttcgtccataaccgcccatgccacacttggatcaacagctgatacggcccgcagaaag

SEQ ID NO: 35187 - DNA, 260 bp, Unknown; identical to SEQ ID NO: 34999
  Description of Unknown: RightRegion for integrase B9188 sequence

SEQ ID NO: 35188 - DNA, 260 bp, Unknown
  Description of Unknown: RightRegion for integrase B9189 sequence
cgctttatccggagaattgacacagatgacgacggcgcgttttttgtaacgccgcgttaggcatatttgaccttcgtgttccaaaaggtaaattatgcccaaaagaatcccccgccttacgacgggggtgttctcatttttcgagtttccgcatgacgctattatagacgcgctcgtttacaattttcaaactgtccatcagctcatcaatgatctcccacgccttgtccggtggtacatcagccaccgcccgcaggaag

SEQ ID NO: 35189 - DNA, 260 bp, Unknown
  Description of Unknown: RightRegion for integrase B9190 sequence
cgcttcatcaagcggattgatgcagacaacgatggcgcgtttttcgtaacgccgcgttaggcatattttaccttggcggacacaaagggtaagtatacctaaaaaatcccccgccgtaaatgacgggggattttttacctatcgagtttacgcatgacgctgttgtagacgcgctcgttaacaactttcaaactgtccatcagttcgtccataaccgcccatgccacacttggctcaacagctgatacggcccgcagaaa

SEQ ID NO: 35190 - DNA, 260 bp, Unknown
  Description of Unknown: RightRegion for integrase B9191 sequence
cgcttcattcggagaattgatgcagataacgacggcgcgttttttgtaacgccccgttaggcatatttgaccttcgcgttccgaaaggtaaattatgcccaaaagatacccccgccttacgacgggggcgttcttatttttcgagcttccgcatgacgctattatagacgcgctcgttcacgattttcaagctgtccatcaactcgtccatgattccccatgccttgtctggcggaacatctgccactgcgcgcagaaaa

SEQ ID NO: 35191 - DNA, 260 bp, Unknown
  Description of Unknown: RightRegion for integrase B9192 sequence
cgctttatccggagaattgacgcagatgacgacggcgcgttttttgtaacgccccgttaggcatatttgaccttcgtgttcccaaaggtaaattatgcccaaaagaacacccccgccttacgacgggggtgttctcatttttccagcttccgcatcacgctgttgtacacgcgctcgttgacgattttcaggctgtccatcagctcgtccatgacctcccacgctcttgccggagccatgtccgagacggcctgcaaaaa

SEQ ID NO: 35192 - DNA, 260 bp, Unknown
  Description of Unknown: RightRegion for integrase B9193 sequence
cgctttatccggagaattgacacagatgacgacggcgcgttttttgtaacgccgcgttaggcatatttgaccttcgtgttccaaaaggtaaattatgcccaaaagaatcccccgccttacgacgggggtgttctcatttttcgagtttccgcatgacgctattatagacgcgctcgtttacaattttcaaactgtccatcagctcatcaatgatctcccacgccttgtccggtggcacatcagccaccgcccgcaggaag

SEQ ID NO: 35193 - DNA, 260 bp, Unknown
  Description of Unknown: RightRegion for integrase B9194 sequence
cgctttatccggagaattgacgcagatgacgacggcgcgttttttgtaacgccccgttaggcatatttgaccttggtgttccaaaaggtaaattatgcccaaaagaacacccccgccttacgacgggggtattctcatttttcgagcttccgcattacgctgttgtacacgcgctcgttgacgattttaaggctgtccatcagctcgtccatgacctcccacgctcttgccggagccatgtcggagacggcctgtaaaaa

SEQ ID NO: 35194 - DNA, 260 bp, Unknown
  Description of Unknown: RightRegion for integrase B9195 sequence
cgctttattcggagaattgacgcagatgacgacggcgcgttttttgtaacgccacgttaggcatatttgaccttggtgttcccaaaggtaaattatgcccaaaagaacacccccgccttacgacgggggtgttctcatttttcgagtttccgcatcacgctgttgtacacgcgctcattgacgattttaaggctgtccatcagctcgtccatgacctcccacgctcttgccggagccatgtcggaaacggcctgcaaaaa

SEQ ID NO: 35195 - DNA, 260 bp, Unknown
  Description of Unknown: RightRegion for integrase B9196 sequence
cgcttcatcaagcggattgatgcagacaacgatggcgcgtttttcgtaacgccgcgttaggcatattttaccttggcggacacaaagggtaagtatacctaaaaatcccccgccgtaaatgacgggggattttttacctatcgagtttacgcatgacgctgttgtagacgcgctcgttaacaactttcaaactgtccatcagttcgtccataaccgcccatgccacacttggctcaacagctgatacggcccgcagaaag

SEQ ID NO: 35196 - DNA, 260 bp, Unknown
  Description of Unknown: RightRegion for integrase B9197 sequence
cgctttatccggagaattgacgcagatgacgacggcgcgttttttgtaacgccacgttaggcatatttgaccttggtgttggataccgtgtagccaaaatagcgctggagcgtctcaaggtcgccgcggtcccacgcgacctcgatcgcatggcgcaccgcgcgctcgacgcgcgagggcgtggtgctgtagcggcgcgcgacttcgggataaagcactttcgtcacggcgttgatgacatccatgtcctgcacggcgat

SEQ ID NO: 35197 - DNA, 260 bp, Unknown; identical to SEQ ID NO: 35189
  Description of Unknown: RightRegion for integrase B9198 sequence

SEQ ID NO: 35198 - DNA, 260 bp, Unknown
  Description of Unknown: RightRegion for integrase B9199 sequence
cgcttcatcaagcggattgatgcagacaacgatggcgcgtttttcgtaacgccgcgttaggcatattttaccttggcggacacaaagggtaagtatacctaaaaaatcccccgccgtaaatgacgggggattttttacctatcgagtttacgcatgacgctgttgtagacacgctcgttaacaactttcaaactgtccatcagttcgtccataaccgcccatgccacacttggctcaacagctgatacggcccgcagaaa

SEQ ID NO: 35199 - DNA, 260 bp, Unknown
  Description of Unknown: RightRegion for integrase B9200 sequence
cgcttcatcaagcggattgatgcagacaacgatggcgcgtttttcgtaacgccgcgttaggcatattttaccttggcggacacaaagggtaagtatgcctaaaaatcccccgccgtaaatgacgggggattttttacctatcgagtttacgcatgacgctgttgtagacgcgctcgttaacaactttcaaactgtccatcagttcgtccataaccgcccatgccacacttggatcaacagctgatacggcccgcagaaag

SEQ ID NO: 35200 - DNA, 137 bp, Unknown
  Description of Unknown: RightRegion for integrase B9201 sequence
attaaagaaatacatatcattgatcagaataatgaaaattatgagattttttttaattaatttgtgtactaaacaaggtataccattaggaactagtatattagtacactaataacaattgtacatatataataagg

SEQ ID NO: 35201 - DNA, 260 bp, Unknown
  Description of Unknown: RightRegion for integrase B9202 sequence
cgcttcatcaggcggattgatgcagacaacgatggcgcgttttttgtaacgccgcgttaggcatattttaccttcacggacgcaaagggtaagtatgcctaaaaatcccccgccgtaaatgacgggggattttttacctatcgagtttacgcatgacgctgttgtagacgcgctcgttaacaactttcaaactgtccatcagttcgtccataaccgcccatgccacacttggctcaacagctgatacggcccgcagaaag

SEQ ID NO: 35202 - DNA, 260 bp, Unknown
  Description of Unknown: RightRegion for integrase B9203 sequence
cgctgcatcaagcggattgatgcagacaacgatggcgcgtttttcgtaacgccgcgttaggcatattttaccttggcggagttcaccgtgtagccgaagtacttctgcagcgtctccagatcaccgcggtcccacgccacctcgatggcgtgccggatggccctctccacccggctgggcgtggtgctgaagcgcctggccacctccggatacagtaccttggtcacggcgttgatgacctccatgtcgtccacggtaat

SEQ ID NO: 35203 - DNA, 260 bp, Unknown
  Description of Unknown: RightRegion for integrase B9204 sequence
cgcttcatcaagcggattgatgcagacaacgatggcgcgtttttcgtaacgccgcgttaggcatattttaccttggcggacacaaaggggaagtatacctaaaaaatcccccgccgtaaatgacgggggattttttacctatcgagtttacgcatgacgctgttgtagacgcgctcgttaacaactttcaaactgtccatcagttcgtccataaccgcccatgccacacttggctcaacagctgatacggcccgcagaaa

SEQ ID NO: 35204 - DNA, 260 bp, Unknown
  Description of Unknown: RightRegion for integrase B9205 sequence
agaaaatatgtagaccgaatttactttgatggacatgatcttaaagtggtgtactattagtatataaccggttggttttggcgcaaataaagaatttaccttgatggaaaaagctttctatgcccaaaaacactgcaaagaatatctagaatctggcgttacttttattcgtgttgtgggtacggaagaaaactatgaccttcaaattaaagaagctattgaaaatcatgtgattgaaggacctcatatgtattgtgcag

SEQ ID NO: 35205 - DNA, 79 bp, Unknown
  Description of Unknown: RightRegion for integrase B9206 sequence
cgctttatccggagaattgacgcagatgatgacggcgcgttttttgtaacgccccgttaggcatatttgccctttgtcg

SEQ ID NO: 35206 - DNA, 260 bp, Unknown
  Description of Unknown: RightRegion for integrase B9207 sequence
cgcttcatcaggcggattgatgcagacaacgatggcgcgttttttgtaacaccgcgttaggcatattttaccttcatggagtttaccgtatagccgaaatacttctgcagcgtctcgatgtcgccccggtcccatgccacctcgatggcgtgacggatggcccgttccacccgggatggggtagtacagaaccgtttggctacctccggatacagtacctttgtcacagcgttgatcacatccatgtcattcaccgcgat

SEQ ID NO: 35207 - DNA, 260 bp, Unknown
  Description of Unknown: RightRegion for integrase B9208 sequence
ataatagataaaataaaaatagagggcactaaaccctcatcaataaaatttttagaataattcatcccctaactaacgtaaccgttctgtctggttaattagggaataattattttacatcaattaataaacatattatatagtaatgtaagaatattgacaaattattttataaatgatatatttagtatagtcacactcgcattgagtgttgtgagtagaaattgttttttttactataaagaagctatttattgttt

SEQ ID NO: 35208 - DNA, 260 bp, Unknown
  Description of Unknown: RightRegion for integrase B9209 sequence
ataatagataaaataaaaatagagggcactaaaccctcatcaataaaatttttagaataattcatcccctaactaacgtaaccgttctgtctggttaattagggaataattattttacatcaattaataaacatattatatagtaatgtaagaatattgacaaattattttataaatgatatgtttagtatagtcacactcgtattgagtgttgtgagtagaaattgttttttttactataaagaagctatttattgttt

SEQ ID NO: 35209 - DNA, 260 bp, Unknown
  Description of Unknown: RightRegion for integrase B9210 sequence
cgcttcatcaagcggattgatgcagacaacgatggcgcgtttttcgtaacgccgcgttaggcatattttaccttggcggacacaaagggtaagtatacctaaaaaatcccccgccgtaaatggtcgggggtcgtaagaaagtaatatcgtatttttgcaggaacggcatggcttcggtcatgccgtttcctccttcatcagttcattcagcgggataaagcccacaaggtcataggaaatgcggatgttctgccgccgtt

SEQ ID NO: 35210 - DNA, 220 bp, Unknown
  Description of Unknown: RightRegion for integrase B9211 sequence
attaaagaaatacatatcattgatcagaataatgaaaattatgagattttttttaattaatttgtgtactaaacaaggtatgccattaggaataacaagtaacaaaataactaaaattactgaaatacaaaaaatcatctcaatcaatgtaaagccattattccttttcatctttcatacctcctataaattactgactacattcatcatcggaataaca

SEQ ID NO: 35211 - DNA, 260 bp, Unknown; identical to SEQ ID NO: 35182
  Description of Unknown: RightRegion for integrase B9212 sequence

SEQ ID NO: 35212 - DNA, 260 bp, Unknown
  Description of Unknown: RightRegion for integrase B9213 sequence
cgctttatccggagaattgacgcagatgacgacggcgcgttttttgtaacgccccgttaggcatatttgccctttgtcgacatgaaggtaaaatacacctaaaagaaaacccccgccttgtgacgggggcattcttacttttccagtttccgcataacgctattatagacgcgctcatttacgatttttaaactgtccatcagctcgtccatgatttcccacgccttgtcctgcggcacgtcagccaccgcccgcagaaa

SEQ ID NO: 35213 - DNA, 117 bp, Unknown
  Description of Unknown: RightRegion for integrase B9214 sequence
cgcttcatcaagcggattgatgcagacaacgatggcgcgtttttcgtaacgccgcgttaggcatattttacctttgcggacacaaagggtaagtatgcctaaaaaacccccgccgta

SEQ ID NO: 35214 - DNA, 260 bp, Unknown
  Description of Unknown: RightRegion for integrase B9215 sequence
cgctttctcaagcggattgatgcagacaacgatggcgcgtttttcgtaacgccgcgttaggcatattttaccttggcggacacaaagggtaagtatgcctaaaaatcccccgccgtaaatgacgggggattttttacctatcgagtttacgcatgacgctgttgtagacgcgctcgttaacaactttcaaactgtccatcagttcgtccataaccgcccatgccacacttggctcaacagctgatacggcccgcagaaag

SEQ ID NO: 35215 - DNA, 260 bp, Unknown
  Description of Unknown: RightRegion for integrase B9216 sequence
aatatacttaaagagatagatataaccaaggaggctattaatattgtgttccctgtataatcacattactttattttacattactgttcaataatatcatgcatatacaaatcctcctctgaattaaattatttaaaaagtactttttatattgtggatattatcacatatttaaaagtttgtaaagtataaaaatatataaatttcaaaaaaagacttttgcatcagaatataatgcaaaagtcttaaaatactatttc

SEQ ID NO: 35216 - DNA, 260 bp, Unknown
  Description of Unknown: RightRegion for integrase B9217 sequence
ctaaagctaaaagaaatccggctgtaccaagatcgccggatagacttcgatttcctttaattccatagttgtacttatccaaatggttaatgtaatctatggaacgcccccgcccattgtaggcgggggcataatttattcatgttccacgatcccgtggtaatacgccgccagctttttctttgctcccggaccgtccttgtccatcagaaatgcccttgccatatccgcgtaaaactccgcaatggacacgccgtatt

SEQ ID NO: 35217 - DNA, 260 bp, Unknown
  Description of Unknown: RightRegion for integrase B9218 sequence
aaagcaaggcaaaaaaagattgaacaatacaaaaaaagaggaggtggattaaatgggtaaagttagaataattccacaaacaatcaatccattaactcaagttaaaattggtactattaaaaagaagaaagttgctgcatatgctcgtgtttcaactgatcaagaagagcaagaatcatcttttgatgctcaagtacaacattttactgaatacattaaaagtcgagatgattgggaattcataaaggtttattctgatg

SEQ ID NO: 35218 - DNA, 109 bp, Unknown
  Description of Unknown: RightRegion for integrase B9219 sequence
attatagagattataattatatctcgcgaaacttttattgaggatattatatttttttagttttatttactgtagtaaccactgtaacccatctgcttttaatgcacta

SEQ ID NO: 35219 - DNA, 109 bp, Unknown; identical to SEQ ID NO: 35218
  Description of Unknown: RightRegion for integrase B9220 sequence

SEQ ID NO: 35220 - DNA, 260 bp, Unknown
  Description of Unknown: RightRegion for integrase B9221 sequence
aatatacttaaagagatagatataaccaaggaggctattaatattgtgttccctgtataatcacattactttattttacattactgttcaataatatcatgcatatacaaatcctcctcttgattaaattatttaaaaagtactttttatattgtggatattatcacacatttaaaagtttgtaaagtataaaaatatataaatttcaaaaaaagactttcgcatcagaatataatgcaaaagtcttaaaatactatttc

SEQ ID NO: 35221 - DNA, 260 bp, Unknown
  Description of Unknown: RightRegion for integrase B9222 sequence
ctaaagctaaaagaaatccggctgtaccaagatcgccggatagacttcgatttcctttaattccatagttacacctaaccaaatggttaatgtaatctatggaacgcccccgcccattgtaggcgggggcacaatttattcatgttccacgatcccgtggtaatacgctgccagctttttctttgctcccgggccgtccttgtccatcagaaatgcccttgccatatccgcgtaaaactccgcaatggacacgccgtact

SEQ ID NO: 35222 - DNA, 260 bp, Unknown
  Description of Unknown: RightRegion for integrase B9223 sequence
aaaaaaatctccgtcagcaacgacggcgaaataaattttgaattagctggctatatttaacctttggtgtgctcacagttaattataaccaaataatagaggggcggttatccgcccctctacttatatgctccgcagtcgctccatcacgctgcgatacgctttgggcattgataccctgagcgtatccatgagatcatccatgatatccatcactgcctgattgtcgcggcccaaaatggtacgtaaaaaatcgctat

SEQ ID NO: 35223 - DNA, 260 bp, Unknown
  Description of Unknown: RightRegion for integrase B9224 sequence
agtatcattgacattataattattgagggagtaacccctgtggaattaaaatttgtataaaagtatatcccctatcctgcataacagttctgtcttgcaggatagggtataacttaactttcatacataattacactactctcaaacaatataaaccattagctttgtttaactttagtctttttcaaaatagaatttattttactcctgtatgcagcatctaaaggtgaatcccaatttttgaaattaactccatcaac

SEQ ID NO: 35224 - DNA, 260 bp, Unknown
  Description of Unknown: RightRegion for integrase B9225 sequence
ggcgacatcttttttgagcttgtttggctacaaagaaccttaacaccagttaacgtataatatagctaaataggggatgcattatgcatcccctaaaatatagtttactgctttttcagctttgccagcggcagagattatcatagttggatcattttttagaacttgcatccaaccttgaagatatgcagcgctatttcggaaagaagctcttgtttctatccctacatgggcgacaaggtttgccgcgccgagctctg

SEQ ID NO: 35225 - DNA, 260 bp, Unknown
  Description of Unknown: RightRegion for integrase B9226 sequence
tcttttattgatcgcatagttataaaatcatacgacgaaatcgatatttttcttttgtgagtaactactgactattatcccttacactgcagaaatcggttatcagcattttggtctgattataacaatttttcataacaaggcattcgttgtgccgatgagcgggaatcatacggcttatctgcaggcctacagcaaggagaatccgaaagggaagcgtcatttgatgcgcctggggaaaatcaagggaatgaataagg

SEQ ID NO: 35226 - DNA, 260 bp, Unknown
  Description of Unknown: RightRegion for integrase B9227 sequence
ctaaagctaaaagaaatccggctgtaccaagatcgccggatagacttcgatttcctttaattccatagttgcacctaaccaaatggttaatgtaatctatggaacgcccccgcccattgtaggcgggggcataattcattcgtgttccacgatcccgtggtaatacgccgccagctttttcttcgctcccggaccgtccttgtccatcagaaacgcccttgccatatccgcgtaaaactccgcaatggacacgccgtact

SEQ ID NO: 35227 - DNA, 260 bp, Unknown
  Description of Unknown: RightRegion for integrase B9228 sequence
ctaaagctaaaagaaatccggctgtaccaagatcgccggatagacttcgattttctttaattccatagttgcacctaaccaaatggttaatgtaatctatggaacgcccccgcccattgtaggcgggggcataatttattcatgttccacgatcccgtggtaatacgccgccagctttttctttgctcccggaccgtccttgtccatcagaaatgcccttgccatatctgcgtaaaactccgcaatggacacgccgtatt

SEQ ID NO: 35228 - DNA, 260 bp, Unknown
  Description of Unknown: RightRegion for integrase B9229 sequence
aatatacttaaagagatagatataaccaaggaggctattaatattgtgttccctgtataattacattactttattttacattactgttcaataatatcatgcatatacaaatcctcctcttgattaaattatttaaaaagtactttttatattgtggatattatcacacatttaaaagtttgtaaagtataaaaatatataaatttcaaaaaaagactttcgcatcagaatataatgcaaaagtcttaaaatactatttc

SEQ ID NO: 35229 - DNA, 260 bp, Unknown
  Description of Unknown: RightRegion for integrase B9230 sequence
attatagagattataattatatctcgcgaaacttttattgaggatattatatttttttaattttatttactgtagtaaccactataacccgtctgcttttaatgcactaccggcattgaatccaaaccatccaaaccaaagaagagaggctccgagaacaacagatggaatattatgaatacgataggttgtatgttcataaccacgtcttcttccaagaataatagcaagcactaatgcactgatacctgaactgatat

SEQ ID NO: 35230 - DNA, 260 bp, Unknown
  Description of Unknown: RightRegion for integrase B9231 sequence
aatatacttaaagagatagatataaccaaggaggctattaatattgtgttccctgtataatcacattactttattttacattactgttcaataatatcatgcatatacaaatcctcctcttgattaaattgtttaaaaagtactttttatattgtggatattatcacacatttaaaagtttgtaaagtataaaaatatataaatttcaaaaaaagactttcgcatcagaatataatgcaaaagtcttaaaatactatttc

SEQ ID NO: 35231 - DNA, 260 bp, Unknown
  Description of Unknown: RightRegion for integrase B9232 sequence
aatatacttaaagagatagatataaccaaggaggctattaatattgtgttccctgtataatcacattactttattttacattactgctcaataatatcatgcatatacaaatcctcctcttgattaaattatttaaaaagtactttttatattgtggatattatcacacatttaaaagtttgtaaagtataaaaatatataaatttcaaaaaaagactttcgcatcagaatataatgcaaaagtcttaaaatactatttc

SEQ ID NO: 35232 - DNA, 260 bp, Unknown
  Description of Unknown: RightRegion for integrase B9233 sequence
agaaaatatatagaccgaatttactttgatggacatgattttaaagttgtgtaccaatagtgcatgaccattcggacatctcatcacctccatactcttaaacgttttttttagcactttttccagaaaactttcattatttttttgattttttgaacttttttgtctaaaatgaaacaatgatgaaatttctaacatatattcacgtttatttaatccaagccatcctgaatttccttccattttgctggattgacgtc

SEQ ID NO: 35233 - DNA, 260 bp, Unknown
  Description of Unknown: RightRegion for integrase B9234 sequence
ataataaataacaaaaataaaaagagaggagcaaatggaaaatggcaaaagtcagagtaatacctagcacactaaatccacttactcaatctccaattagtgaaacaaagaaaaagaaagttgctgcctatgctcgtgtttcaactgactcagatgagcaatatacttcatacgaaatgcaagttaaatattataaaaaattcattcaagaacatgatggatggatttatgtaaatgtttatgctgatgaaggtataact

SEQ ID NO: 35234 - DNA, 260 bp, Unknown
  Description of Unknown: RightRegion for integrase B9235 sequence
ctcaaaataaaagaaatccgggtctacaaagatcgccggattgattttgactttatttaattccctagtttgtgttaaccattaggttaacacaaactagggaacgagacagcacccccgcacactatgcgggggtgctgtctatctgttgagctttgccatcacgctattatacaccctgctatttgaaataatcagcgcatccataagctcgtccatcacgccccatgctttttccggtgacgctttggcgactgctt

SEQ ID NO: 35235 - DNA, 260 bp, Unknown
  Description of Unknown: RightRegion for integrase B9236 sequence
aaaagaatctccgtcgatcaggacgggggaataaattttgaattagttggccatatttgacattaggagtactcacagttaattatagccaaacaatagaggggcggttatccgcccctctacctatatactccgcagtcgctccatcacactgcgatacgcttttggcatagctactctgagcgtgtccatgagatcatccatgatatccattactgcctgattgtcgcggcccgaaacagtacgtaaaaaatcgctgt

SEQ ID NO: 35236 - DNA, 260 bp, Unknown
  Description of Unknown: RightRegion for integrase B9237 sequence
ctcaaaataaaagaaatccggctatacaaagacagccggattgaattcgattttctctaaaaacttagttagacgtaacctgacggttgcatccaactaagtacacggcaatatcccccgcccaaacaggcgggggatcgcttatcctcgcatctttcgcatcacgttatcatacattcgcgcattggttactttcagcgcatccatcaactcgtccactatggcccacgcctgttccggcgcgcgggatgataccgctt

SEQ ID NO: 35237 - DNA, 260 bp, Unknown
  Description of Unknown: RightRegion for integrase B9238 sequence
ctcaaaataaaagaaatccggctatacaaagaccgccggattgaatttgattttctgtaagtacttagtttctataacccgttaggttacagcaaactaagtacacaagaatatcccccgccaaaacaggcgggggatactttatcctcgcatctttcgcatcacgttatcatacattcgcgcgttggttactttcagcgcatccatcaactcgtccactatggcccacgcctgttccggcgcgcgggatgataccgctt

SEQ ID NO: 35238 - DNA, 260 bp, Unknown
  Description of Unknown: RightRegion for integrase B9239 sequence
ctaaaaataaaagaaatccggctatacaaagaccgccggattgaatttgattttctgtaagtacttagtttatataacccgttaggttacacaaaactaagtacacaagagtatcccccgccaaaacaggcgggggatattttatcctcgcatctttcgcatcacgttatcatacattcgcgcgttggtcactttcagcgcatccatcaactcgtccactatggcccacgcctgttccggcgcgcgggatgataccgctt

SEQ ID NO: 35239 - DNA, 109 bp, Unknown
  Description of Unknown: RightRegion for integrase B9240 sequence
ctcaaaataaaagaaatccggctatacaaagaccgccggattgaatttgattttctgtaagtacttagtttatataaaccttttcccaaggtgcggtataccgagcgtc

SEQ ID NO: 35240 - DNA, 260 bp, Unknown
  Description of Unknown: RightRegion for integrase B9241 sequence
ctcaaaataaaagaaatccggctatacaaagaccgccggattgaatttgattttctgtaagtacttagtttatataaaccgttaggttacacaaaactaagtacacaagagtatcccccgccaaaacaggcgggggatactttatcctcgcatctttcgcatcacgttatcatacattcgcgcattggttactttcagcgcatccatcaactcgtccactatggcccacgcctgttccggcgcgcgggatgataccgctt

SEQ ID NO: 35241 - DNA, 109 bp, Unknown
  Description of Unknown: RightRegion for integrase B9242 sequence
caaattattgactatatagactttgacgctgatttaaagcctattatacattttaaatagcttgtactataggcaacacttctaagggtaaggcttgtaagagctccgg

SEQ ID NO: 35242 - DNA, 260 bp, Unknown
  Description of Unknown: RightRegion for integrase B9243 sequence
aaggctcgtcaaagggcgatagcgcaatatcgaagaaaggaaggcaagcacaatggctaaggttaccatcatcccatcgaaaataaacccaataacgcttactcccgttgggcaagtggccaaaaggaaggttgccgcttacgctcgtgtttcaaccgacagcgacgagcagtacacaagctacgatgctcaagtcacttactacacgaacttcataaatggcaaaccgaactgggaattcgtaaaggtctatgcggacg

SEQ ID NO: 35243 - DNA, 260 bp, Unknown
  Description of Unknown: RightRegion for integrase B9244 sequence
ctcaaaataaaagaaatccggctatacaaagacagccggattgaattcgattttctctaaaaacttagttagacgtaacctgacgcatgcgggcgttttttcggtcgatttcagccggatagacacaggcaaaaccgtgtgttttcttgtgtcaggcggcctttcggctgccgctggtttgttggcgtaggggacggcgtcccgacgtcccgtcagcgcggcagcgccgcgccggaaaacggattcccacgccagtgtgt

SEQ ID NO: 35244 - DNA, 260 bp, Unknown
  Description of Unknown: RightRegion for integrase B9245 sequence
ctcaaaataaaagaaatccggctatacaaagaccgccggattgaatttgattttctgtaagtacttagtttatataaaccgtttccgaaggtccgctacaccgagcgtcccgacgtggccacggcctgcatcatggagggcgatgtggtggtgatggtggacaactccccgtcggcgctgctgctgcccaccacgctgctgcggtttaccgaggagatcaacgactactatttcccgccccttatcggctcttacctcca

SEQ ID NO: 35245 - DNA, 260 bp, Unknown
  Description of Unknown: RightRegion for integrase B9246 sequence
ctcaaaataaaagaaatccggctatacaaagacagccggattgaattcgattttctctaaaaacttagttagacgtaacctgacggttgcgtcaaactaagtacacggcaatatcccccgccaaaacaggcgggggatactttatcctcgcatctttcgcatcacgttatcatacattcgcgcattggttactttcagcgcatccatcaactcgtccactatggcccacgcctgttccggcgcgcgggatgataccgctt

SEQ ID NO: 35246 - DNA, 260 bp, Unknown
  Description of Unknown: RightRegion for integrase B9247 sequence
ctcaaaataaaagaaatccggctatacaaagaccgccggattgaatttgactttctgtaagtacttagtttatataaaccgttaggttacaacaaactaagtacacaagaatatcccccgccaaaacaggcgggggatactttatcctcgcatctttcgcatcacgttatcatacattcgcgcattggttactttcagcgcgtccatcaactcgtccactatggcccacgcctgttccggcgcgcgggatgataccgctt

SEQ ID NO: 35247 - DNA, 109 bp, Unknown
  Description of Unknown: RightRegion for integrase B9248 sequence
ctaaaaataaaagtaatccggctatacaaagaccgccggattgaatttgattttctgtaagtacttagtttatataaaccttttcccaaggtgcggtataccgagcgtc

SEQ ID NO: 35248 - DNA, 260 bp, Unknown
  Description of Unknown: RightRegion for integrase B9249 sequence
tggagaaaatatatagaacgaatttactttgacgggcataactttaaagtggtgtactaataatatagcaccggttggttgatatctattagtacacacagaaaaacgaagaggacttgaaaatatagcgagccctcttttttgttttacttctcaataaggaagttgtttaagtcatctcgtacatgtttaagttggtcaatgccattaccagtaattgtgtgattgattatgacatacaaacttttcatgattacttt

SEQ ID NO: 35249 - DNA, 260 bp, Unknown
  Description of Unknown: RightRegion for integrase B9250 sequence
ctaaaaataaaagaaatccggctatacaaagaccgccggattgaatttgattttctgtaagtacttagtttatataaacctttaggttacagcaaactaagtacacaagaatatcccccgcccaaacaggcgggggatactttatcctcgcatctttcgcatcacgttatcatacattcgcgcgttggttactttcagcgcatccatcaactcgtccactatggcccacgcctgttccggcgcgcgggataataccgctt

SEQ ID NO: 35250 - DNA, 260 bp, Unknown
  Description of Unknown: RightRegion for integrase B9251 sequence
ctcaaaataaaagaaatccggctatacaaagaccgccggattgaatttgattttctgtaagtacttagtttatataacccgttaggttatagcaaactaagtacacaagagtatcccccgccaaaacaggcgggggatactttatcctcgcatttttcgcatcacgttatcatacattcgcgcattggttactttcagcgcatccatcaactcgtccactatggcccacgcctgttccggcgcgcaggatgataccgctt

SEQ ID NO: 35251 - DNA, 260 bp, Unknown
  Description of Unknown: RightRegion for integrase B9252 sequence
caaattattgactatatagactttgacgctgatttaaagcccattatacattttaaatagcttgtactataggcaacacttctaaaggtaaggcttgtaagagctccggtacgagtacggccctatcggcatataaagcctcatgagccaagcctttcttcacctgccgcgtaaccagcgatacaaccgccacattggtcacttcactacccgtgccgcacgttgaaggcaccagaatgagctcactgcctttacaaggc

SEQ ID NO: 35252 - DNA, 260 bp, Unknown; identical to SEQ ID NO: 35244
  Description of Unknown: RightRegion for integrase B9253 sequence

SEQ ID NO: 35253 - DNA, 260 bp, Unknown
  Description of Unknown: RightRegion for integrase B9254 sequence
ctcaaaataaaagaaatccggctttacaaagatcgccggattgaatttgattttctgtaagtacttagtttatataaccctttaggttacagaaaaccaagtacacaagaatatcccccgcctaaacaggcgggggatactttatcctcgcatctttcgcattacgttatcatacattcgcgcattggttactttcagcgcatccatcaactcgtccactatggcccacgcctgttccggcgcgcgggatgataccgctt

SEQ ID NO: 35254 - DNA, 260 bp, Unknown
  Description of Unknown: RightRegion for integrase B9255 sequence
ctcaaaataaaagaaatccggctatacaaagacagccggattgaattcgattttctctaaaaacttagttagacgtaacctgacggttgcgtccatctaagtacacggcaatatcccccgcccaaacaggcgggggatcgcttatcctcgcatctttcgcatcacgttatcatacattcgcgcattggttactttcagcgcatccatcaactcgtccactatggcccacgcctgttccggcgcgcgggatgataccgctt

SEQ ID NO: 35255 - DNA, 260 bp, Unknown
  Description of Unknown: RightRegion for integrase B9256 sequence
tggagaaaatatatagaccgaatttactttgacgggcataactttaaagtggtgtactaataatatagcaccggttggttaacatctattagtacacacagaaaaacgaagaggacttgaaaatataacgagccctcttttgtttttacttctcaataaggaagtcgtttaagtcatctcgtacatgcttaagttggtcaatgccattaccagtaattgtgtgattgattatgacataaagactttttatgattacttta

SEQ ID NO: 35256 - DNA, 260 bp, Unknown
  Description of Unknown: RightRegion for integrase B9257 sequence
ctcaaaataaaagaaatccggctatacaaagaccgccggattgaatttgactttctgtaattacttagtttatataatccgttaggttgcataaaactaagtacacaagaatatcccccgccaaaacaggcgggggatactttatcctcgcatctttcgcatcacgttatcatacattcgcgcgttggtcactttcagcgcatccatcaactcgtccactatggcccacgcctgttccggcgcgcgggaagataccgctt

SEQ ID NO: 35257 - DNA, 260 bp, Unknown
  Description of Unknown: RightRegion for integrase B9258 sequence
ctcaaaataaaagaaatccggctatacaaagacagccggattgaattcgattttctctaaaaacttagttagacgtaacctgacgcatgtgggcgtttttgcggtcgatttcagccggatagacacaggcaaaaccgtgtgttttcttgtgtcaggcggcctttcgactgttcttttttgattcttcttaatacgccacgccccagtagatgtcggtggtgcacgccttgccgcacaccacgcacttgccggtggtgccg

SEQ ID NO: 35258 - DNA, 109 bp, Unknown
  Description of Unknown: RightRegion for integrase B9259 sequence
ctcaaaataaaagaaatccggctttacaaagatcgccggattgaatttgattttctgtgagtacttagtttatataatccttttcccacggtaaggtatactgagaggc

SEQ ID NO: 35259 - DNA, 260 bp, Unknown
  Description of Unknown: RightRegion for integrase B9260 sequence
ctcaaaataaaagaaatccggctatacaaagaccgccggattgaatttgactttctgtaagtacttagtttatataatccgttaggttacagaaaactaagtacacaagaatatcccccgccaaaacaggcgggggatactttatcctcgcatctttcgcattacgttatcatacatccgcgcattggtcactttcagcgcgtccatcaactcgtccactatggcccacgcctgttccggtgtgcgggatgataccgctt

SEQ ID NO: 35260 - DNA, 260 bp, Unknown
  Description of Unknown: RightRegion for integrase B9261 sequence
ctcaaaataaaagaaatccggctatacaaagacagccggattgaattcgattttctctaaaaacttagttagacgtaacctgacggttgcgtccaactaagtacacggcaatatcccccgcccaaacaggcgggggatcgcttatcctcgcatctttcgcatcacgttatcatacattcgcgcattggttactttcagcgcatccatcaactcgtccactatggcccacgcctgttccggcgcgcgggatgataccgctt

SEQ ID NO: 35261 - DNA, 260 bp, Unknown
  Description of Unknown: RightRegion for integrase B9262 sequence
ctcaaaataaaagaaatccggctatacaaagaccgccggattgaatttgactttctgtaagtacttagtttatataaccctttaggttacagtaaactaagtacacaagaatatcccccgccaaaacaggcgggggatactttatcctcgcatctttcgcatcacgttatcatacattcgcgcgttggttactttcagcgcatccatcaactcgtccactatggcccacgcctgttccggcgcgcgggatgatactgctt

SEQ ID NO: 35262 - DNA, 260 bp, Unknown
  Description of Unknown: RightRegion for integrase B9263 sequence
ctcaaaataaaagaaatccggctatacaaagaccgccggattgaatttgattttctgtaaatacttagtttatataaacctttaggttacagcaaactaagtacacaggaatatcccccgccaaaacaggcgggggatactttatcctcgcatctttcgcatcacgttatcatacattcgcgcattggttactttcagcgcatccatcaactcgtccactatggcccacgcctgttccggcgcgcgggatgataccgctt

SEQ ID NO: 35263 - DNA, 260 bp, Unknown
  Description of Unknown: RightRegion for integrase B9264 sequence
ctcaaaataaaagaaatccggctatacaaagaccgccggattgaatttgattttctgtaagtacttagtttatataaacctttaggttacagcaaactaagtacacagaagtatcccccgccaaaacaggcgggggatactttatcctcgcatctttcgcatcacgttatcatacatccgcgcgttggtcactttcagcgcgtccatcaactcgtccactatggtccacgcctgttccggtgtgcgggatgataccgctt

SEQ ID NO: 35264 - DNA, 260 bp, Unknown
  Description of Unknown: RightRegion for integrase B9265 sequence
ctcaaaataaaagaaatccggctatacaaagaccgccggattgaatttgattttctgtaagtacttagtttatataaacctttaggttacacaaaactaagtacacaagagtatcccccgccaaaacaggcgggggatactttatcctcgcatctttcgcatcacgttatcatacattcgcgcattggttactttcagcgcatccatcaactcgtccactatggcccacgcctgttccggcgcgcgggatgataccgctt

SEQ ID NO: 35265 - DNA, 260 bp, Unknown
  Description of Unknown: RightRegion for integrase B9266 sequence
cttaaaataaaggaaatccggctatacaaagaccgccggattgaatttgattttctgtaagtacttagtttatataacccttttcccaaggtgcggtataccgagcgtccggacgtggccacggcgtgtatcatggagggcgatgtggtggtgctggtggacaattcagcgtcggccctgctgctgcccacaacgatcctgcggttcaacgaggagatcaacgactactacttcccgcccctcatcggcacgtatctgca

SEQ ID NO: 35266 - DNA, 260 bp, Unknown
  Description of Unknown: RightRegion for integrase B9267 sequence
ctcaaaataaaagaaatccggctatacaaagaccgccggattgaatttgattttctgtaagtacttagtttatataaacctttaggttatacaaaactaagtacacaagaatatcccccgccaaaacaggcgggggatactttatcctcgcatctttcgcatcacgttatcatacattcgcgcattggtcactttcagcgcatccatcaactcgtccactatggcccacgcctgttccggcgcgcgggatgataccgctt

SEQ ID NO: 35267 - DNA, 260 bp, Unknown
  Description of Unknown: RightRegion for integrase B9268 sequence
ctcaaaataaaagaaatccggctttacaaagatcgccggattgaatttgacttcctgtaagtacttagtttatataaacctttaggttacagcaaactaagtacacaagaatatcccccgcctgttttggcgggggatactttatcctcgcatctttcgcatcacgttatcatacattcgcgcattggttactttcagcgcatccatcaactcgtccactatggcccacgccttttccggcgcgcgggatgataccgctt

SEQ ID NO: 35268 - DNA, 260 bp, Unknown
  Description of Unknown: RightRegion for integrase B9269 sequence
aagagcaaggaagatgtgacggtggtgttcaaagacggcaccgaaatgaaagcagaataaggtatgaagcagatacgacactcaggatttatgtcctgggtgtttttgctatgtgtacaaagtgcaaatttcgagatgagttcattgaagtgaaagcaaagatgtgttataatattatccgattagtgttattttacaaatttcagatgaggtgatacgaatgctgaaaaataatatagaagtagatgtaaaaatcaagt

SEQ ID NO: 35269 - DNA, 260 bp, Unknown; identical to SEQ ID NO: 35261
  Description of Unknown: RightRegion for integrase B9270 sequence

SEQ ID NO: 35270 - DNA, 260 bp, Unknown
  Description of Unknown: RightRegion for integrase B9271 sequence
aagagcaaggaagatgtgacggtggtgttcaaagacggcaccgaaatgaaagcagaataaggtatgaagcagatacgacactcaggatttatgtcctgggtgtttttgctatgtgtacaaagtgcaaatttcgagatgagtacattgaagtgaaagcaaagatgtgttataatattatccgattagtgttattttacaaatttcagatgaggtgatacgaatgctgaaaaataatatagaagtagatgtaaaaatcaagt

SEQ ID NO: 35271 - DNA, 109 bp, Unknown
  Description of Unknown: RightRegion for integrase B9272 sequence
ctcaaaataaaagaaatccggctatacaaagacagccggattgaattcgattttctctaaaaacttagttagacgtaacctgacgcatgtgggcgtttttgcggtcgat

SEQ ID NO: 35272 - DNA, 109 bp, Unknown; identical to SEQ ID NO: 35247
  Description of Unknown: RightRegion for integrase B9273 sequence

SEQ ID NO: 35273 - DNA, 260 bp, Unknown
  Description of Unknown: RightRegion for integrase B9274 sequence
ctcaaaataaaagaaatccggctatacaaagatagccggattgaattcgattttctctaaaaacttagttagacgtaacctgacggttacaaccaactaagtacacaagaaaatccccccgccaaaacaggcggggggatactttatcctcgcatctttcgcataacgctgtcatacacccgcgaatttgtcactttgagtgcgtccatcaactcatccataatgctccacgcttttcctgcatcacaagccatcaccgc

SEQ ID NO: 35274 - DNA, 260 bp, Unknown
  Description of Unknown: RightRegion for integrase B9275 sequence
ctcaaaataaaagaaatccggctatacaaagaccgccggattgaatttgattttctgtaagtacttagtttatataaacctttaggttacacaaaactaagtacacaagaatatcccccgccaaaacaggcgggggatactttatcctcgcatctttcgcatcacgttatcatacattcgcgcattggttactttcagcgcatccatcaactcgtccactatggcccacgcctgttccggcgcacgggatgataccgctt

SEQ ID NO: 35275 - DNA, 260 bp, Unknown
  Description of Unknown: RightRegion for integrase B9276 sequence
aatttgattgatcatatagtcgtccacaaagacaattcgcttgatatttaccttctttaactgtgtggataatccattgttattttttccctacaaagtacattaaactcaagtagtccatttgggcatcgatcttgtccttcttttaaatatccttcattaatcaattcctgtacacttgtaggtgtcgttagattatctatttcatataagataatttgtgaatcaacaatatctaaaagagcctgacaccctttatc

SEQ ID NO: 35276 - DNA, 260 bp, Unknown; identical to SEQ ID NO: 35260
  Description of Unknown: RightRegion for integrase B9277 sequence

SEQ ID NO: 35277 - DNA, 260 bp, Unknown
  Description of Unknown: RightRegion for integrase B9278 sequence
tggagaaaatatatagaacgaatttactttgatgggcataactttaaagtggtgtactaataatatagcaccggttggatttgactcaaaaaaagaattttctttaatggaaaaagctttctatgcccaaaaacactgtaaagaatatttagaatctggtgttacctttattcgtgcagtaggtacagaagaaaactatgacctacaaattaaagaggccattgacaaccatgtgattgaaggacctcatatgtattgtg

SEQ ID NO: 35278 - DNA, 260 bp, Unknown
  Description of Unknown: RightRegion for integrase B9279 sequence
caaattattgactatatagactttgatgctgatttaaagcctattatacattttaaatagcttgtactacaggcaacacttctaagggtaaggcttgtaagagttccggtatgagtacggccctatcggcatacaaggcctcgtgagccaagccttttttcacctgtcgcgtaaccagcgatacgaccgctacattggtcacttcactacccgtgccgcacgttgaaggcaccataatgagttcgctgcctttacaaggc

SEQ ID NO: 35279 - DNA, 260 bp, Unknown
  Description of Unknown: RightRegion for integrase B9280 sequence
ctcaaaataaaagaaatccggctttacaaagatcgccggattgaatttgacttcctgtaagtacttagtttatataaacctttaggttacagaaaactaagtacacaagaatatcccccgcctgttttggcgggggatactttatcctcgcatctttcgcatcacgttatcatacattcgcgcattggttactttcagcgcatccatcaactcgtctactatggcccacgcctgttccggcgcgcgggatgataccgctt

SEQ ID NO: 35280 - DNA, 82 bp, Unknown
  Description of Unknown: RightRegion for integrase B9281 sequence
ctcaaaataaaagaaatccggctatacaaagaccgccggattgaatttgattttctgtaagtacttagtttatataaacctt

SEQ ID NO: 35281 - DNA, 260 bp, Unknown
  Description of Unknown: RightRegion for integrase B9282 sequence
ctcaaaataaaagaaatccggctttacaaagatcgccggattgaatttgatttcctgtgagtacttagtttatataatcctttaggttacagcaaactaagtacacatagcccctctgccaattcaggcagaggggctactttagttattcagcttccgcataacgctgtcatacacccgcatgtttgtaaccttgagtgcgtccatcaactcgtccattacgcccaacgcttttcctgcatcacaacccattattgccc

SEQ ID NO: 35282 - DNA, 260 bp, Unknown
  Description of Unknown: RightRegion for integrase B9283 sequence
tggagaaaatatatagaacgaatttactttgacgggcataactttaaagtggtgtactaataatatagcgccggtcggattcgactcaaaaaaagaatttagcttaatagaaaagatattctatgcacaaaagcactgtagagaatatcttcaatctggagtaacatttattcgtgttgtaggcacggaagaaaattatgatctacaaattaaagaagccattcaaaatgatgtgattcaaggccctcatatgtattgtg

SEQ ID NO: 35283 - DNA, 260 bp, Unknown
  Description of Unknown: RightRegion for integrase B9284 sequence
cttaaaataaaggaaatccggctatacaaagaccgccggattgaatttgattttctgtaagtacttagtttatataaccctttaggttacgcagaactaagtacacaagagtatcccccgccaaaacaggcgggggatactttatcctcgcatctttcgcatcacgttatcatacattcgcgcattggttactttcagcgcatccatcaactcgtccactatggcccacgcctgttccggcgcgcgggatgataccgctt

SEQ ID NO: 35284 - DNA, 260 bp, Unknown
  Description of Unknown: RightRegion for integrase B9285 sequence
ctcaaaataaaagaaatccggctatacaaagaccgccggattgaatttgattttctgtaagtacttagtttatataaaccgtttcccaaggtccggtatacggagcgccctgacgtggccacggcctgcatcatggagggcgacgtggtggtgatggtggacaactccccgtcggcgctgctgctgcccaccacgctgctgcggttcaccgaggagatcaacgactactacttcccgcccctcattggctcctatctcca

SEQ ID NO: 35285 - DNA, 260 bp, Unknown
  Description of Unknown: RightRegion for integrase B9286 sequence
ctcaaaataaaagaaatccggctatacaaagaccgccggattgaatttgactttctgtaagtacttagtttatataatccgttaggttacagcaaactaagtacacaagaatatcccccgcctgtttgggcgggggatactttatcctcgcatctttcgcatcacgttatcatacatccgcgcattggttactttcagcgcatccatcaactcgtccactatggcccacgcctgttccggcgcgcgggatgacaccgctt

SEQ ID NO: 35286 - DNA, 260 bp, Unknown
  Description of Unknown: RightRegion for integrase B9287 sequence
ttgaaaataaaagaaatccggctctacgaagatcgccggattgaatttgattttctttgactacatagttttgcataaccatgtggttgcgcaaaataatgtatacgaaagtatcccccgccaaaacaggcgggggatactttatcctcgcatctttcgcatcacgttatcatacattcgcgcgttggtcactttcagcgcatccatcaactcgtccactatggcccacgcctgctccggtgcgcgggatgataccgctt

SEQ ID NO: 35287 - DNA, 260 bp, Unknown
  Description of Unknown: RightRegion for integrase B9288 sequence
gtgaacagggacggcagcattacattacgcttcgttagcggcgcagagataaccgtataaaaacagcaatgcccacaggttttgacggtctgtgggctttttcccgttgtgggaacttattacgagtgatttcgacaaacgggctatgttaccacaccgttaggctgaacgccaaatacatttcaccaagcgtggaaaaaggagtcaaattatgtcgaactacaaaaacaacaaacaggtcatggaagcaggcagacgcg

SEQ ID NO: 35288 - DNA, 260 bp, Unknown
  Description of Unknown: RightRegion for integrase B9289 sequence
agaattctaaaaaaaatcgtcatcacacaaaatgatgactttttaattgaaccgtattagccatttttgcattaacagacggggaattgggccggcaaaacggtggacgtggcgcgcggccgcttttcccatcgcggcgcggaatatcgtttgatcgacctgcccggcatgtgctcgatgaaaagcgacagcgccgaggaaaagctggcgcgcgacttcatcgccttcgagccgattgacgcggccgtcgtcgttgccga

SEQ ID NO: 35289 - DNA, 260 bp, Unknown
  Description of Unknown: RightRegion for integrase B9290 sequence
ttgaaaataaaagaaatccggctctacgaagatcgccggattgaatttgattttctttgactacatagttttacataaccatgtggttgcacaaaataatgtatacgaaagtatcccccgcctattttggcgggggatactttatcctcgcatctttcgcatcacgttatcatacattcgcacgttggtcactttcagcgcatccatcaactcgtccactatggcccacgcttgttcaggcgcacgggatgataccgctt

SEQ ID NO: 35290 - DNA, 260 bp, Unknown
  Description of Unknown: RightRegion for integrase B9291 sequence
cgaagcttgatagatcatattgatgtaagtggcgatatgcctgttattttttttaaataaaacttgtagtaactcatcggcaccgtccggcagcttcggttcaaactgcaagtacgccttgccttcactgtccttctcggccagtgcggccacgctgtccggatacttgcctttatcgatttcatagagagccgccgcattgtcgatggtacgaatatccgcactgattttagcgagctttgccgtcttgccggcggaca

SEQ ID NO: 35291 - DNA, 260 bp, Unknown
  Description of Unknown: RightRegion for integrase B9292 sequence
cgcaccatcaagcgcattgacgccgacaacaatggcgcattttttgtaaccacgcgttaggcacagtttacactgccgctatatagcgtcaactatacccaactcccccagccgctttggctgggggagttttcttcacttcgcgatagcgcaatagtacgccgccagtttcgctttcggttccggcgcatccttatcccacaaaaacgcctttgccaagtccccgtaaaactcagccgtaaaaacgccgtgccgctccg

SEQ ID NO: 35292 - DNA, 260 bp, Unknown
  Description of Unknown: RightRegion for integrase B9293 sequence
cgcaccatcaagcgcattgacgccgacaacaatggcgcattttttgtaaccacgcgttaggcatagtttacactgccgctatgtagcgttaactatacctaactcccccagccgatttggctgggggagttttcttcacttcgcaatagcgcaatagtacgccgccagtttcgcttttggttccggcgcatccttatcccacaaaaacgcctttgccaagtccccgtaaaactccgccgtaaacacaccgtgccgttctg

SEQ ID NO: 35293 - DNA, 260 bp, Unknown
  Description of Unknown: RightRegion for integrase B9294 sequence
cgtactgtccggcggatcgatatcacaaatgaagatgttttttctgttactcctatttagccatataacaactaacctgtatgttaattataatatggctaaataaaaagcccccaggaaaattcccgggggctgtctttctgtcaatcgcttttcttaggttcggtataagaaagcgcctggctggaatcgcttaggccgcttgtggtggggtcgtttaacaggttccatacagataccagaacagacaccacgattac

SEQ ID NO: 35294 - DNA, 260 bp, Unknown
  Description of Unknown: RightRegion for integrase B9295 sequence
cgtactgtccggcggatcgatatcacaaatgaagatgttttttctgttactcctatttagccatataacaactaacctgtatgctgatttaagccggttaaggcgttaaagacggtgctttttccaacgttaggattgccggctaatgcgatgaccttttcctggtcagaggattttacaattgcgggaatgtcgccggacgcagcgctgcgtgtggattgttttgtcaggcccatggtcaattcccctttcttaccgct

SEQ ID NO: 35295 - DNA, 260 bp, Unknown
  Description of Unknown: RightRegion for integrase B9296 sequence
atttctactcacacatcccgtgtgggatgtgacagctaccacctaaagcaaatccgatgattgcagcatttctactcacacatcccgtgtgggatgtgacttccataattacactcctaacacatatcttagtacaatttctactcacacatcccgtgtgggatgtgactacagtacttgctttttgacggattaacacaggagcatttctactcacacatcccgtgtgggatgtgaccagttagatgtattaagggtgg

SEQ ID NO: 35296 - DNA, 260 bp, Unknown
  Description of Unknown: RightRegion for integrase B9297 sequence
ggaattataaaaaaaataattgtttccaagaacggcgtggagaatgtcgtttttatttaaagcatgtattatctttatgaatcattattggtagataagtattcataaagataattacaaaggaataatataagtcaacaaaacgtacaatgtacgttaatatcctcactatacatggcgtacattgtgcgctataatgtaatcatagtcaagtaaggaggttgcaatggagatcaaagagatgcggatcctgcttgggg

SEQ ID NO: 35297 - DNA, 260 bp, Unknown
  Description of Unknown: RightRegion for integrase B9298 sequence
cgcaccatcaagcgcattgacgccgacaacaatggcgcattttttgtaaccacgcgttaggcatagtttacactgccgctatatagcgtcaactacgcccaactcccccagccaaagcggctgggggagttttcttcacttcgcgatagcgcaatagtacgccgccagtttcgctttcggttccggcgcatccttatcccacaaaaacgcctttgccaagtccccgtaaaactcagccgtaaaaacgccgtgccgctccg

SEQ ID NO: 35298 - DNA, 260 bp, Unknown
  Description of Unknown: RightRegion for integrase B9299 sequence
cgcaccatcaagcgcattgacgccgacaacaatggcgcattttttgtaaccacgcgttaggcatagtttacactgccgctatgtagcgttaactacacccaactcccccagccgctttggctgggggagttttcttcacttcgcgatagcgcaatagtacgccgccagtttcgctttcggttccggcgcatccttatcccacaaaaacgcctttgccaagtccccgtaaaactcagccgtaaaaacgccgtgccgctccg

SEQ ID NO: 35299 - DNA, 260 bp, Unknown
  Description of Unknown: RightRegion for integrase B9300 sequence
cgcaccatcaagcgcattgacgccgacaacaatggcgcattttttgtaaccacgcgttaggcacagtttacactgccgctatgtagcgttaactatacccaactcccccagccgatttggctgggggagttttcttcacttcgcaatagcgcaatagtacgccgccagtttcgcttttggttccggcgcatccttatcccacaaaaacgcctttgccaagtccccgtaaaactccgccgtaaacacgccgtgccgttctg

SEQ ID NO: 35300 - DNA, 260 bp, Unknown
  Description of Unknown: RightRegion for integrase B9301 sequence
cgcaccatcaagcgcattgacgccgacaacaatggcgcattttttgtaaccacgcgttaggcacagtttacactgccgctatgtagcgttaactatacccaactcccccagccgatttggctgggggagttttcttcacttcgcaatagcgcaatagtacgccgccagtttcgcttttggttccggcgcatccttatcccacaaaaacgcctttgccaagtctccgtaaaactcagccgtaaaaacgccgtgccgctccg

SEQ ID NO: 35301 - DNA, 260 bp, Unknown
  Description of Unknown: RightRegion for integrase B9302 sequence
cgcaatgctcttgattctgtacatgtttcccctgacgaaatagaagttttcttcaagtaaaaagcagacatttctgcctgccctttactaggagaattttatgaccaatgtaaacgaaagtacatctataatatacaccagaaaatcgccgaatgcaaacggtgattttttctttactaacattatgcgacctgtaggctatgacaagttagtatagaattttgtgcataaaaaaacagcccgccgaaaaccttcgacag

SEQ ID NO: 35302 - DNA, 260 bp, Unknown
  Description of Unknown: RightRegion for integrase B9303 sequence
agttttataaaggaaattaaaatagaccatgaatgtaatgtgaaattaaaatttcactaatcatggtcatatataactatatttctttgttgtttatccttttagctaaatccttaacctttttttctatttctaatgcgcaacttattattttttgtttgttaccagttggtaacgatatattaataataagtttttattgctatatttaactttacttctaacaattacatttgaaaataagctttatctaactttat

SEQ ID NO: 35303 - DNA, 260 bp, Unknown
  Description of Unknown: RightRegion for integrase B9304 sequence
agagaaaaggcaaggcaaagggctaaagcgcattacaagaaagaaggagctgatgaataatggcaaaagtaacaataataccttcaaagattaatccaattacacatcagcatcttgatgttaaagtaaagagaagggttgcagcatatgcacgtgtttcaaccgatgacgagatgcaattaacttcatatgaagcgcaagttgattattatacaaagctaataaaggccaatgatgaatgggaatttgtcaaagtatat

SEQ ID NO: 35304 - DNA, 182 bp, Unknown
  Description of Unknown: RightRegion for integrase B9305 sequence
tttatatcatctatagaagttctcccggataagaccctgaacataaaaataggacactaagcgtgccctattcctcatcctcgtatggattgcgtcctgtaatttgttcgcatactgcctccgcaacattagttgcatatgcactatgctaatattattatttttctttcctacatctattt

SEQ ID NO: 35305 - DNA, 260 bp, Unknown
  Description of Unknown: RightRegion for integrase B9306 sequence
atgaaggaaaccgcacggcaaagaacactgcaacgctacgcatcgaaagaggtggaatgatggcaagagaagtaagagtaatccctgcaagtgtacacaaatttacgaccgttcctttcggctctactgtaaggaaaaaggtcgcaggctacgctcgtgtgtctacagaccttgaagaacagctcaccagctacgaggcgcaggtggattactacaccaagtacattcagaataatcccgattgggactttgttgaggtg

SEQ ID NO: 35306 - DNA, 260 bp, Unknown; identical to SEQ ID NO: 35189
  Description of Unknown: RightRegion for integrase B9307 sequence

SEQ ID NO: 35307 - DNA, 260 bp, Unknown
  Description of Unknown: RightRegion for integrase B9308 sequence
tcgtttgttgaatcggtgctggtgtatgaggatggaagcatggacattcgttttttgtagtctttgtcgtactaactatgcaccgcctgtcggctcatcagccaaaataatatctggatcagaaatcaagctgcgggctgcggctacacgctgcttttgaccgccggacatttgcgccggaaactttgaaagaacatcagtaattccaagaaatccggctatatcatttaggtgcttttcggctatggaactatctatat

SEQ ID NO: 35308 - DNA, 260 bp, Unknown
  Description of Unknown: RightRegion for integrase B9309 sequence
cgcttcatcaagcggattgatgcagacaacgatggcgcgtttttcgtaatgccgcgttaggcatattttacctttgcggacacaaagggtaagtatgcctaaaaatcccccgccgtaaatgacgggggattttttacctatcgagtttacgcatgacgctgttgtagacgcgctcgttaacaactttcaaactgtccatcagttcgtccataaccgcccatgccacacttggatcaacagctgatacggcccgcagaaag

SEQ ID NO: 35309 - DNA, 260 bp, Unknown
  Description of Unknown: RightRegion for integrase B9310 sequence
aaacgggctgccgctgctaaatcatcaaaaacaaggagatggagaaaatgccaaaagtaacaaaaattccgccaagattaaatcctgccacttttgcacctttggagagtgttgaaaaacgaaaagttgcaggatatgcaagagtttcaactgattcagaagaacaaaaaacttcctatactgcccaagtggattactatacgaaattcattaaagaacggatcgattgggaatttgtcggagtttatacagatgaaggc

SEQ ID NO: 35310 - DNA, 260 bp, Unknown
  Description of Unknown: RightRegion for integrase B9311 sequence
gaaatgcggaaaaaagccgctgagcatagcaagaaaagaggtaagaaatgtcaagagtaacagttattccggcaaaacttgatagggctacattcatgccgctggataagcccataaagcgcagagtagccggatatgcacgagtttcgacagactccgaggaacagcagacctcctacgaagcacaggtatcctactacacagagtacatccagaagcgtgatgactgggagtttgcaggcgtgtatacggatcaagga

SEQ ID NO: 35311 - DNA, 260 bp, Unknown
  Description of Unknown: RightRegion for integrase B9312 sequence
tttatatcatctatagaagttctccccgataagaccctgaacataaaaataggacactaagcgtgccctattcctcatccgcgtatggattgtgacctgtaatttgttcgcatactgcttccgcaacattagttgcatatgcactatgctaatatattatttttctttcctacatctatttgaattatgacaatatcctgtgaaatgtaagtaattgatatgttatatgtttgtaaaatttataataccctcatggcact

SEQ ID NO: 35312 - DNA, 260 bp, Unknown
  Description of Unknown: RightRegion for integrase B9313 sequence
aaacgtgctgccgctgctgaatcatcaaaaacaaggagatggagaaaatgccaaaagtaacaaaaattccgccaagattaaatcctgccacttttgcacctttggagagtgttgaaaaacgaaaagttgcaggatatgcaagagtttcaactgattcagaagaacaaaaaacttcctatactgctcaagtggattactatacgaaattcattaaagaacggatcgattgggaatttgtcggagtttatacagacgaaggc

SEQ ID NO: 35313 - DNA, 260 bp, Unknown; identical to SEQ ID NO: 33843
  Description of Unknown: RightRegion for integrase B9314 sequence

SEQ ID NO: 35314 - DNA, 260 bp, Unknown
  Description of Unknown: RightRegion for integrase B9315 sequence
gcaagaagaaaggcggttgaaatacatggcaaaagtaacagtaatcccatcaacgattaatccaattactaaattacctaataatggtttacaaaaaagaaaagttgcaggttatgctagagtttcaacgattttagatgagcagtgttcttcatatcaagcacaagtcgattactatacaaacttaataaaaagaaatccagaatgggaatttgtcgaagtatatgctgatgaaggcatatcaggaacaaatacaaaaa

SEQ ID NO: 35315 - DNA, 260 bp, Unknown
  Description of Unknown: RightRegion for integrase B9316 sequence
gatggcagactgcagataagattttatgatggaacagaatttgagttgacagcagaataaggcaaaaggatcggtaggtgaatcagtaggatttgcttaccggcttttttgctttataagaataatactacattttaatgctacaaaattattgacaaaacaaaaaaagtagtaataaaatgtagtaaaaggagggctaaatgaaaacatatagtgttaaggaaattgcagaacttttaaatacaaatcctgaaactgta

SEQ ID NO: 35316 - DNA, 260 bp, Unknown
  Description of Unknown: RightRegion for integrase B9317 sequence
aatcaaaatgagctggaatttcacttgatcggtggattagaacttgcggaggaaatatgatcttggtgtcttgtataccaaattgcagggcattttatgttggtattgatactggatttttgcaaagctttgtggtatcattgtcggttgaaaggagtgagtttatgcctaaaaacagaataatcccattcggttactgtatgaaaaacggtgagataataaccgagcccaacgagctctataccgttgttacaatattt

SEQ ID NO: 35317 - DNA, 260 bp, Unknown
  Description of Unknown: RightRegion for integrase B9318 sequence
gatggtaggcttcagataaagttttataacgggacagagtttgaagtagaaactgaataaggaagtaaaatggccggtaggtgaatcgcagtgatttgcttaccggctttttttgcgttagaaatagtgcttgctatgtgttcgatatatggtcaatagtataatgcccggactaaaagaaaaaccagataacgaaaggttttgaaaggagggagacagaaattggtctggagaatttatgaaaggaagtggtcaatttg

SEQ ID NO: 35318 - DNA, 260 bp, Unknown
  Description of Unknown: RightRegion for integrase B9319 sequence
aaaacagtcaaaaaaatctatttatctagcgattcagtggccgattttgatttaatctaagccgttatataatatgattaaaccgtcaggttttatcatattatataacgcataaaatgagccccagaaactggggctcatttgctacactgcgtctattttccgcataacgctattgtacactcttgtgttgactactttgagcgtgtccattaactcatccatgatatcccacaccgacgcagggtctttgccctcca

SEQ ID NO: 35319 - DNA, 260 bp, Unknown
  Description of Unknown: RightRegion for integrase B9320 sequence
aaaacagtcaaaaaaatctatttatctagcgattcagtggccgattttgatttaatctaagccgttatataatatgataaaacctgacggttttattatattatataacgcataaaatgagccccagaaaactggggctcatttgctacactgcgtctattttccgcataacgctattgtacactcttgtgttgactactttgagcgtgtccattaactcatccatgatatcccacaccgccgcagggtctttgccctcc

SEQ ID NO: 35320 - DNA, 260 bp, Unknown
  Description of Unknown: RightRegion for integrase B9321 sequence
cgcacaatccagcgcattgatgctgataatgacggtgcgttttttgtaacgcctcgttaggcatattttacgttgcggttagtcacagtgaaatatgcctaaaatcccccgcctttgtagacgggggatttctcatatagcctgaagttttcgcatgacattatcatagacctttctgtttaccactttcaaggtgtccaacagttcatccatgatttcccatgctttttctgggtctttaccatcgacagctctcaaaa

SEQ ID NO: 35321 - DNA, 260 bp, Unknown
  Description of Unknown: RightRegion for integrase B9322 sequence
cgcacaatccagcgcattgatgctgataatgacggtgcgttttttgtaacgcctcgttaggcatattttacgttgcggttggtcacagtaaaatatacctaaaatcccccgcctttgcagacgggggatttctcatatagcctgaagttttcgcatgacattatcatagacttttctgtttaccactttcaaagtgtccaacagttcatccatgatttcccatgctttttcagggtctttaccctcgacagctctcaaaa

SEQ ID NO: 35322 - DNA, 260 bp, Unknown
  Description of Unknown: RightRegion for integrase B9323 sequence
aaaacagtcaaaaagatctatctatccaacgattcagtggccgattttgatttaatctgaaccgttgtataatctataataaccggacggtttaatcatattatataacgcataaaattagccccagtttctggggctaatttgctacactgcgtctattttccgcataacgctattgtacactcttgtgttgactactttgagcgtgtccattaactcatccatgatatcccacaccgccgcagggtctttgccctcca

SEQ ID NO: 35323 - DNA, 260 bp, Unknown; identical to SEQ ID NO: 35320
  Description of Unknown: RightRegion for integrase B9324 sequence

SEQ ID NO: 35324 - DNA, 260 bp, Unknown
  Description of Unknown: RightRegion for integrase B9325 sequence
ccggaaatgaaagagcaggccagacagcgggcattgcagacaaggagggtacaaaaatgagcaccgcgacagtccggtcggtcacgatcattccaccgaccatcaaccctttgacgcatatttctatggcggccactcggaaacggcgagtcgccgggtacgcaagagtgtccacagacagcgatgaacagttcaccagctatgaagctcaaatcgactactacacccaatacatccagcgtaattccgaatgggcgttc

SEQ ID NO: 35325 - DNA, 260 bp, Unknown
  Description of Unknown: RightRegion for integrase B9326 sequence
ccggaaatgaaagagcaggccagacagcgggcattgcagacaaggagggtacaaaaatgagcaccgcagcagtccggtcggtcacaatcattccaccaaccatcaacattctgacgcatctttctacggcgaccacccagaaaaggcgggtcgctgggtatgccagagtgtccaccgacagcgatgagcagttcaccagctatgaagcccaaatcgactactacacgcagtacatccggtgcaatccagaatgggagttc

SEQ ID NO: 35326 - DNA, 260 bp, Unknown
  Description of Unknown: RightRegion for integrase B9327 sequence
tgtgaggaaaaagaagttgttgagcttatttatttacataaagaaaaaaaagagggctgatgcccaaaatgattacaagtctatatatttatttacaaaaaagagtttaacataatcctagatcaatcggtatactatgatgagtagtgttgaatagcaaaaaaaaagaacaagtcgaacttgttctttttcttaacacatgttataatgtgtttgctagattacaagaaagattataacataagaatttgagattgcaa

SEQ ID NO: 35327 - DNA, 260 bp, Unknown
  Description of Unknown: RightRegion for integrase B9328 sequence
agaaatactcttggcaaaattttagtaggtgatactatttctttcactttcagaggatgatatatacttatgtgtcgtgaccgttctgtcacgacacataagtatattgcaacgaaaaaagccgccaacgtacggcgacttcttcggaaagtgtgtgtgtattcaataaagaaggaaagttcttttttaatacacaataattttataacaaactttattgtgtgtcaatagaaaaagcagggtttcccctgccttttcta

SEQ ID NO: 35328 - DNA, 260 bp, Unknown; identical to SEQ ID NO: 35004
  Description of Unknown: RightRegion for integrase B9329 sequence

SEQ ID NO: 35329 - DNA, 260 bp, Unknown
  Description of Unknown: RightRegion for integrase B9330 sequence
gaagaaatgaaagcagccgccaatcaaaaagcattagagaggaataagcacaatgcctaaagttaccatgattcctgcaaccataaatccgctgacgcacttgccaaaagaaaccacgcagaaaaggcgggttgccgggtacgcccgtgtttccaccgacagcgatgagcagttcacaagctacgaagcacaagtggactactacacaaaattcattcagtcaaagcctgaatgggatttcgtaaaggtctatacagacg

SEQ ID NO: 35330 - DNA, 260 bp, Unknown
  Description of Unknown: RightRegion for integrase B9331 sequence
gaaaaaaggcagaaagcggctgagcaagcacggaggcaccatgcaaagacaggtcgttaagcgcgaggtacaggtcatccagccgacgcttcggacagggctgatgcattccaccctcgctccggcaatcaagcagagggttgccgcctacgcccgtgtttcaaccgagcacgaggaacagcagagcagctatgaagctcaggtggattactacaccaggaagatcaaagagagatccgactggtcgtttgtggaggtgt

SEQ ID NO: 35331 - DNA, 260 bp, Unknown
  Description of Unknown: RightRegion for integrase B9332 sequence
agaacagtaaagcggattgaagcagacaataacggtgcgttttttgttttgcctcgttaggtatattttatgtttcctacactgaacattaaatatgcctaacaacccccgcctaaaaaggcgggggttgttttattcgagcttccgcataacgttgttataaatgcgctcattcacaactttcaggctgtccataagctcgtccatgatctcccacgccttttcctgtgagactttcgatacggcgcgtaagaaatcgc

SEQ ID NO: 35332 - DNA, 260 bp, Unknown
  Description of Unknown: RightRegion for integrase B9333 sequence
ctgcgcaccgtccagcgggtggtcatccatccggatcgacacccagagatcgtattctaagtctgattttttatcagaatttttcattgttattgaaacttctgctcagcgatatttgcacaacaatgagcaaataatccgatcttactggacaagccatcacaaagggaggatggcttatcatgcacaacattgaccaggtgatccgcagcatcagcggacactatgaccggcgctgctacgaggcgctgcatctggcg

SEQ ID NO: 35333 - DNA, 260 bp, Unknown
  Description of Unknown: RightRegion for integrase B9334 sequence
gacgagatgaaagaagccgcccgtcagaaaacattagaaaggagcaagcataatgcctaaagttacgatgataccggcgactgtaaattccttgacgcatctgccaaaggcatccgtgcagaaaaggcgtgttgccggatatgcccgagtttcaactgacagtgatgagcagttcacaagctatgaagcgcaggtggactactacacccgatacattcagtcaaagccggagtgggatttcgtaagggtctataccgatg

SEQ ID NO: 35334 - DNA, 260 bp, Unknown
  Description of Unknown: RightRegion for integrase B9335 sequence
agaacagtaaagcggatcgaagcagataataacggtgcgttttttgttttgcctcgttaggcttattttatattccccacactgaacattaaatatgcctaacaacccccgcctaaaaaggcgggggttgttttattcgagcttccgcataacgttgttataaatgcgctcattcacaactttcaggctgtccataagctcgtccatgatctcccacgccttttcctgtgagactttcgatacggcgcgtaagaaatcgc

SEQ ID NO: 35335 - DNA, 92 bp, Unknown
  Description of Unknown: RightRegion for integrase B9336 sequence
cgcttcatcaggcggattgacgcagacgacaacggcgcgtttttcgtaacgccgcgttaggcatattttaccttcacgtcggcgaaggggaa

SEQ ID NO: 35336 - DNA, 260 bp, Unknown
  Description of Unknown: RightRegion for integrase B9337 sequence
cgctttattcggagaattgacgcagatgacgacggcgcgttttttgtaacgccacgttaggcatatttgaccttcgtgttcccaaaggtaaactatgcccaaaaggacacccccgtcttgcgacgggggtgttctcatttttcgagcttccgcatcacgctgttgtacacgcgctcgttgacgattttaaggctgtccatcagctcgtccatgacctcccacgctcttgctggagccatgttagagacggcccgcaaaaa

SEQ ID NO: 35337 - DNA, 260 bp, Unknown
  Description of Unknown: RightRegion for integrase B9338 sequence
ctgcgcaccgtccagcgggtggtcatccatccggatcgacacccagagatcgtattctaagtctgattttttatcagaaattttcattgttaatgaaacttctgctcagcgatatttgcacaacaatgagcaaataatctgatcttactggacaagccatcacaaagagaggatggcttatcatgcacaacattgaccaggtgatccgcagcatcagtggacactatgaccggcgctgctacgaggcgctgcatctggcg

SEQ ID NO: 35338 - DNA, 260 bp, Unknown
  Description of Unknown: RightRegion for integrase B9339 sequence
ccggaaatgaaagaaaaggcaaggcaggcaacgacagaaaggtggagatcaaatggctaacgcaagaaaggtacaggtcatagaggcaacaatcaatcctaagacgcacctgtccactacatcgcctcgcaagcgccgtgtagcagcatacgcccgcgtctcgaccgattcggatgaacaggcaggcagctacgatgcacagattgattactataccaggtacatctgcaacagacctgattgggagttcgtaaaggttt

SEQ ID NO: 35339 - DNA, 260 bp, Unknown
  Description of Unknown: RightRegion for integrase B9340 sequence
caaaatttagattttacaagaggaaattccggcattagaggattttgcggcatatattagaaatccggtatttatgcaattttgctccgagattaaaaagaagtacaggtgcaatgagaaaatagaatttagccgttgtagttgggaacgtggttggaatgtaaaatttaaaaagtctggaaaaagcctgtgtaccgtatatcccagggaaggatattttacggtactggtggtggttggtgaaaaagaaaaagaagcag

SEQ ID NO: 35340 - DNA, 260 bp, Unknown
  Description of Unknown: RightRegion for integrase B9341 sequence
ctgcgcaccgtccagcgggtggtcatccatccggatcgacacccagagatcgtattctaagtctgattttttatcagaaattttcattgttaatgaaacttctgctcagcgatatttgcacaacaatgagcaaataatccgatcttactggacaagccatcacaaagagaggatggcttatcatgcacaacattgaccaggtgatccgcagcatcagcggacactatgaccggcgctgctacgaggcgctgcatctggcg

SEQ ID NO: 35341 - DNA, 260 bp, Unknown; identical to SEQ ID NO: 35333
  Description of Unknown: RightRegion for integrase B9342 sequence

SEQ ID NO: 35342 - DNA, 260 bp, Unknown
  Description of Unknown: RightRegion for integrase B9343 sequence
agaacagtaaagcggatcgaagcagataataacggcgcgttttttgttttgcctcgttaggcttattttatattccccacactgaacatctaatatgcctaacaccccccacctaaaaaggcggggggtgtcttattcgagtttccgcataacgttgttataaatgcgctcattcacaacctttaaactgtccataagctcgtccataacctcccatgcgcgggaggggtcaacgcttgccacagcccggaggaaatcac

SEQ ID NO: 35343 - DNA, 260 bp, Unknown
  Description of Unknown: RightRegion for integrase B9344 sequence
ctgcgcaccgtccagcgggtggtcatccatccggatcgacacccagagatcgtattctaagtctgattttttatcaaaaattttcattgttaacgaaacttctgctcagcgatatttgcacaacaatgagcaaataatccgatcttactggacaagccatcacaaagagaggatggcttatcatgcacaacattgaccaggtgatccgcagcatcagcggacactatgaccggcgctgctacgaggcgctgcatctggca

SEQ ID NO: 35344 - DNA, 260 bp, Unknown
  Description of Unknown: RightRegion for integrase B9345 sequence
ctgcgcaccgtccagcgggtggtcatccatccggatcgacacccagagatcgtattctaagtctgattttttatcagaatttttcattgttgaggaaacttttctgagaatatgtttgcacaacaatgagaaaagaatcaggccgacactggacaagccatctcaagagaggatggcttatcatgcacaacattgaccaggtgatccgcagcatcagtggacactatgaccggcgctgctacgaggcgctgcatctggcg

SEQ ID NO: 35345 - DNA, 260 bp, Unknown
  Description of Unknown: RightRegion for integrase B9346 sequence
agaacagtaaagcggatcgaagcagataataacggtgcgttttttgttttgcctcgttaggcttattttatattccccacactgaacatctaatatgcctaacaacccccacctaaaaaggcgggggttgtcttattcgagtttccgcataacgttgttataaatgcgctcattcacaacctttaaactgtccataagctcgtccataaccgcccatgcgcgggaggggtcaacgcttgccacagcccggaggaaatcac

SEQ ID NO: 35346 - DNA, 260 bp, Unknown
  Description of Unknown: RightRegion for integrase B9347 sequence
ccggaaatgaaagaaaaggcaagacgggcaacggcagaaaggtggaaagcaaatggctaatgcaagaaaagttcaggtcatagaggcaacaatcaatccgaaaacgcatctgtccaccacgtcgcctcgcaagcgccgtgtagcagcatacgcccgcgtctcgaccgattcggatgaacaggcaggcagctacgacgcacagatcgattattataccaggtacatctgtaacagacctgattgggagtttgtgaaggttt

SEQ ID NO: 35347 - DNA, 260 bp, Unknown
  Description of Unknown: RightRegion for integrase B9348 sequence
attcgccggattgtagtttcagaaaacggcgacatcttttttgaacttgtttggctataaagaaccttaacaccagttaacgtataatatggctaaataggggatgcactacgcatcccctaaaatatagtttactgctttttcagctttgccggcggcagagactgtcatggttggatcattttttagaactcgcatccagctttgaagatatgctgcactatttcggaaagaagctcttgtttctatcccaacatggg

SEQ ID NO: 35348 - DNA, 260 bp, Unknown
  Description of Unknown: RightRegion for integrase B9349 sequence
cgcacgatccagcgcatcgacgcagacaatgacggtgcgttttttgtaacgcccagttagttttattttcatgtcacaacgcctacgtcaaaatataactaaccccccggcatttgccgagggggttaagtttagctttccaatttccgcatgacgctattgtaaacccgctcattgaccactttcaagctgtccatcagctcgtccatgacctcccacgcacgggctgggtcaacgttggacactgcccggaggaattc

SEQ ID NO: 35349 - DNA, 260 bp, Unknown
  Description of Unknown: RightRegion for integrase B9350 sequence
attcgccggattgtgatttcagaaaacggcgacatcttttttgaacttgtttggctataaagaaccttaacacctgttatcgtataatatagctaaacaggggatgcattatgcatcccctaaaatatagtttactgctttttcagctttgccagcggcagagactatcatagttggatcattttttagaactcgcatccaaccttgaagatatgcagcgctatttcggaaagaagctcttgtttctatcccaacatggg

SEQ ID NO: 35350 - DNA, 260 bp, Unknown
  Description of Unknown: RightRegion for integrase B9351 sequence
cgctttatccggagaattgacgcagatgacgacggcgcgttttttgtaacgccacgttaggcatatttgaccttcgtgttcccaaaggtaaattatgcccaaaagaacacccccgccttacgacgggggtgttctcatttttccagcttccgcattacgctgttgtacacgcgctcgttgacgattttaaggctgtccatcagctcgtccatgacctcccacgctcttgccggagccatgtcggagacggcctgtaaaaa

SEQ ID NO: 35351 - DNA, 127 bp, Unknown
  Description of Unknown: RightRegion for integrase B9352 sequence
attcgccggattgtagtttcagaaaacggcgacatcttttttgaactcgtttggctataaagaaccttaacaccagttaacgtataatatagctaaacaggggatgcattatgcatcccctaaaata

SEQ ID NO: 35352 - DNA, 260 bp, Unknown
  Description of Unknown: RightRegion for integrase B9353 sequence
cgcttcatcaggcggattgatgcagacaacgatggcgcgtttttcgtaacgccccgttaggcatattttaccttcacggagtttaccgtatagccgaaatacttctgcagcgtctcgatgtcgccccggtcccatgccacctcgatggcgtgacggatggcccgttccacccgggatggggtagtacagaaccgtttggctacctccggatacagtacctttgtcacagcgttgatcacatccatgtcattcaccgcgat

SEQ ID NO: 35353 - DNA, 260 bp, Unknown
  Description of Unknown: RightRegion for integrase B9354 sequence
cgctttatccggagaattgacgcagatgacgacggcgcgttttttgtaacgccccgttaggcatatttgcccttggtgttcccaaaggttaattatgcccaaaagaacacccccgccttacgacgggggtgttctcatttttcgagcttccgcatcacgctgttgtacacgcgctcgttgacgattttaaggctgtccatcagctcgtccatgacctcccacgctcttgccggggccatgtcggagacggcctgcaaaaa

SEQ ID NO: 35354 - DNA, 260 bp, Unknown
  Description of Unknown: RightRegion for integrase B9355 sequence
cgctttatccggagaattgatgcagatgacgacggcgcgttttttgtaacgccacgttaggcatatttgaccttcgtgttcccaaaggtaaattatgcccaaaagaatcccccgccttacgacgggggtgttctcatttttcgagcttacgcatgacgctattatagacgcgctcgttcacaattttcaaactgtccatcagctcgtccatgatctcccacgccttgtccggcggaatatctgccactgcgcgcaggaag

SEQ ID NO: 35355 - DNA, 260 bp, Unknown
  Description of Unknown: RightRegion for integrase B9356 sequence
tggacaccggagatgcgggaagccgcacgaaagaaaacacagaggcgaggtgagcattgatgcaggcagcaaaaaatataacggtcatcccagcgacacggatgatgcacacgggacttcctcgcaatgctgccgtccgaaagcgtgtggcgggttatgcccgtgtctctaccgacagcgaagaacagcagacgagctatgaagcacaggtggattattacaccaattatatccagtcgaagcctgattgggagttcgtc

SEQ ID NO: 35356 - DNA, 260 bp, Unknown
  Description of Unknown: RightRegion for integrase B9357 sequence
cgcttcatcaggcggattgatgcagacaacgatggcgcgtttttcgtaacgccccgttaggcatattttaccttcacggacataaagggcaaatatgcctaaaaaatcccccgccgtaaatgacgggggatttttcacttttccagcttgcgcataacgctgttatacactcgctcgttgacgaccttcaagctgtccatgagttcgtccatcacttcccacgcacgggccgggtcaacgcgggccaccgcgcggaggaa

SEQ ID NO: 35357 - DNA, 71 bp, Unknown
  Description of Unknown: RightRegion for integrase B9358 sequence
ttttttaatctcctgtcaagatactgtctcttatacacatctccgagcccacgagactaggcatgatctcg

SEQ ID NO: 35358 - DNA, 260 bp, Unknown
  Description of Unknown: RightRegion for integrase B9359 sequence
cgcacgatccagcgcatcgacgcagacaatgacggtgcgttttttgtaacgcccagttagtcttattttcatgtcacaacgcctacgtcaaaatataactaaccccccggcatttgccgagggggttaagtttagctttccaattttcgcatgacgctattataaacccgctcgttgaccactttcaagctgtccatcagctcgtccatgacctcccacgcacgggctgggtcaacgttagacaccgcccggaggaattc

SEQ ID NO: 35359 - DNA, 260 bp, Unknown
  Description of Unknown: RightRegion for integrase B9360 sequence
attcgccggattgtagtttcagaaaacggcgacatcttttttgaactcgtttggctataaagaaccttaacaccagttaacgtataatatagctaaacaggggatgcattatgcatcccctaaaatatagtttactgctttttcagctttgccagcggcagagattatcatagttggatcattttttagaacttgcatccaaccttgaagatatgcagcgctatttcggaaagaagctcttgtttctatccctacatggg

SEQ ID NO: 35360 - DNA, 260 bp, Unknown
  Description of Unknown: RightRegion for integrase B9361 sequence
cgcacgattcagcgcatcgacgcagacaatgacggtgcgttttttgtaacgcccagttagtcttattttcacgtcacaacgcctacgtcaaaatataactaaccccccggcatttgccgaggggttaagtttagctttccaatttccgcatgacgctattataaacccgctcgttgatcactttcaagctgtccatcagctcgtccatgacctcccacgcacgggctgggtcaacgttagataccgctcggaggaaatcg

SEQ ID NO: 35361 - DNA, 260 bp, Unknown
  Description of Unknown: RightRegion for integrase B9362 sequence
cgctttattcggagaattgacgcagatgacgacggcgcgttttttgtaacgccccgttaggcatatttgaccttcgtgttcacgaaggtcaaatatgcctaaaaaaaacacccccgtcgtaaggcgggggtgtcctcatttttcgagcttccgcatcacgctgttgtacacgcgctcgttgacgattttaaggctgtccatcagctcgtccatgacctcccacgctcttgctggagccatgttagagacggcccgcaaaa

SEQ ID NO: 35362 - DNA, 260 bp, Unknown
  Description of Unknown: RightRegion for integrase B9363 sequence
cgcacgatccagcgcatcgacgcagacaatgacggtgcgttttttgtaacgccaagttagtcttattttcatgtcacaacgctaacattaaaatataactaacccctcggcatttgccgaggggttaaatttagctttccaatttccgcatgacgctattgtaaacccgctcgttgaccactttcaagctgtccatcagctcgtccatgacctcccacgcacgggctgggtcaacgttagataccgcccggaggaattcg

SEQ ID NO: 35363 - DNA, 260 bp, Unknown
  Description of Unknown: RightRegion for integrase B9364 sequence
cgcttcatcaggcggattgatgcagacaacgatggcgcgttttttgtaacaccgcgttaggcatattttaccttcatggaattcaccgtatacccgaagtatttttgcagcgtctcgatgtccccccggtcccaggccacctcgattgcgtggcggatggcccgctccacccgggacggcgtggtgcagaagcgcttggctacctcgggatacagtacctttgtcacggcgttgatcacatccatgtcattcaccgcgat

SEQ ID NO: 35364 - DNA, 260 bp, Unknown
  Description of Unknown: RightRegion for integrase B9365 sequence
cgcttcatcaggaggattgatgcagacaacgatggcgcgtttttcgtaacgccgcgttaggtatattttactttcacgttggataccgtgtagccaaaatagcgctggagcgtctcaaggtcgccgcggtcccacgcgacctcgatcgcatggcgcaccgcgcgctcgacgcgcgagggcgtggtgctgtagcggcgcgcgacttcgggataaagcactttcgtcacggcgttgatgacatccatgtcctgcacggcgat

SEQ ID NO: 35365 - DNA, 260 bp, Unknown
  Description of Unknown: RightRegion for integrase B9366 sequence
cgctttatccggagaattgacgcagatgacgacggcgcgttttttgtaacgccacgttaggcatatttgacctttgtgttcccaaaggtaaattttgcccaaaagaatcccccgccttacgacgggggtgttcttatttttcgagcttccgcatcacgctgttgtacacgcgctcgtttacgattttcaagctgtccatcagctcgtccatgatctcccacgccttgtccggtgaaacatctgccactgcgcgcaaaaaa

SEQ ID NO: 35366 - DNA, 260 bp, Unknown
  Description of Unknown: RightRegion for integrase B9367 sequence
cgctttatccggagaattgacgcagatgacgacggcgcgttttttgtaacgccccgttaggcatatttgcccttggtgttcccaaaggttaattatgcccaaaagaacacccccgccttacgacgggggtattctcatttttcgagcttccgcattacgctgttgtacacgcgctcgttgacgattttaaggctgtccatcagctcgtccatgacctcccacgctcttgccggggccatgtcggagacggcctgcaaaaa

SEQ ID NO: 35367 - DNA, 260 bp, Unknown
  Description of Unknown: RightRegion for integrase B9368 sequence
cgcacgatccagcgcatcgacgcagacaatgacggtgcgttttttgtaacgcccagttagtcttattttcatgtcacaacgcctacattaaaatataactaaccccccggcatttgccgaggggtttaagtttagctttccaatttccgcatgacgctattgtaaacccgcgcatttaccactttcaagctgtccatcagctcgtccatgacctcccacgcacgggctgagtcaacgttagccaccgcccggaggaattc

SEQ ID NO: 35368 - DNA, 260 bp, Unknown
  Description of Unknown: RightRegion for integrase B9369 sequence
cgctttatccggagaattgacgcagatgacgacggcgcgttttttgtaacgccacgttaggcatatttgcccttggtgttcccaaaggtaaattttgcccaaaagaatcccccgccttacgacgggggtgttcttatttttcgagcttccgcatcacgctgttgtacacgcgctcgtttacgattttcaagctgtccatcagctcgtccatgatctcccacgctcttgccggagccatgtcggagacggcctgcaaaaaa

SEQ ID NO: 35369 - DNA, 260 bp, Unknown
  Description of Unknown: RightRegion for integrase B9370 sequence
cgcttcatcaggcggattgatgcagacaacgatggcgcgtttttcgtaacgccccgttaggcatattttaccttcacggacataaaggacaaatatgcctaaaaaatcccccgccgtaaatgacgggggatttttcacttttccagcttgcgcataacgctgttatacactcgctcgttgacgaccttcaagctgtccatcagctcgtccatgatctcccatgccttgtccggtgaaacatctgccactgcgcgcaggaa

SEQ ID NO: 35370 - DNA, 81 bp, Unknown
  Description of Unknown: RightRegion for integrase B9371 sequence
cgctttatccggagaattgacgcagatgacgacggcgcgttttttgtaacgccccgttaggcatatttgaccttggtgttc

SEQ ID NO: 35371 - DNA, 260 bp, Unknown
  Description of Unknown: RightRegion for integrase B9372 sequence
cgctttattcggagaattgacgcagatgacgacggcgcgttttttgtaacgccccgttaggcatatttgaccttcgtgttcccaaaggtaaattatgcctaaaagaatccccccgccttacgacgggggtattctcatttttcgagcttccgcatcacgctgttgtacacgcgctcgttgacgattttaaggctgtccatcagctcgtccatgacctcccacgctcttgctggagccatgtcggagacggcctgcaaaaa

SEQ ID NO: 35372 - DNA, 260 bp, Unknown
  Description of Unknown: RightRegion for integrase B9373 sequence
cgcacgatccagcgcatcgacgcagacaatgacggtgcgttttttgtaacgcctagttagtcttattttcatgtcacaacgcctacgttaaaatataactaaccccccggcatttgccgagggggttaagtttagttttccaatttccgcatgacgctattataaacccgctcgttgaccactttcaagctgtccattagctcgtccatgacctcccacgcacgggctgggtcaacgttagacaccgcccggaggaaatc

SEQ ID NO: 35373 - DNA, 260 bp, Unknown; identical to SEQ ID NO: 35356
  Description of Unknown: RightRegion for integrase B9374 sequence

SEQ ID NO: 35374 - DNA, 260 bp, Unknown; identical to SEQ ID NO: 34890
  Description of Unknown: RightRegion for integrase B9375 sequence

SEQ ID NO: 35375 - DNA, 260 bp, Unknown
  Description of Unknown: RightRegion for integrase B9376 sequence
cgctttatctggagaattgacgcagatgacgacggcgcgttttttgtaacgccacgttaggcatatttgaccttggcgttcccaaaggtaaattatgcccaaaagaatccccccgccttacgacgggggtgttctcatttttccagcttccgcatcacgctgttgtacacgcgctcgttgacgattttcaggctgtccatcagctcgtccatgacctcccacgctcttgccggagccatgtccgagacggcctgcaaaaa

SEQ ID NO: 35376 - DNA, 260 bp, Unknown; identical to SEQ ID NO: 35359
  Description of Unknown: RightRegion for integrase B9377 sequence

SEQ ID NO: 35377 - DNA, 260 bp, Unknown
  Description of Unknown: RightRegion for integrase B9378 sequence
cgctttatccgaagaattgatgcagatgacgacggcgcgttttttgtaacgccgcgttaggcataatttacctttgtcgacacgaaggtaaattatacccaaaagaacacccccgccttacgacgggggtattctcatttttcgagtttccgcatgacgctgttatagacgcgctcgttcactattttcaagctgtccatcagctcgtccatgatctcccatgccttgtccggtgaaacatctgccactgcgcgcaggaa

SEQ ID NO: 35378 - DNA, 73 bp, Unknown
  Description of Unknown: RightRegion for integrase B9379 sequence
attcgccggattgtagtttcagaaaacggcgacatcttttttgaacttgtttggctataaagaaccttaacac

SEQ ID NO: 35379 - DNA, 260 bp, Unknown
  Description of Unknown: RightRegion for integrase B9380 sequence
cgcgtcatcaagcggattgatgcagacaacgatggcgcgttttttgtaatgccacgttaggcatattttaccctcgcggacacaaaggataagtatacctaaaaatcccccgccgtaaatgacgggggattttttacctatcgagtttacgcatgacgctgttgtagacgcgctcgttaacaactttcaaactgtccatcagttcgtccataaccgcccatgccacacttggctcaacagctgatacggcccgcagaaag

SEQ ID NO: 35380 - DNA, 260 bp, Unknown
  Description of Unknown: RightRegion for integrase B9381 sequence
cgctttatccggagaattgacgcagatgacgacggcgcgttttttgtaacgccccgttaggcatatttgcccttgctgttcccaaaggtaaattatgcctaaaatgacacccccgccgtaaggcgggggtgttctcatttttcgagcttccgcatcacgctgttgtacacgcgctcgttgacgattttaaggctgtccatcagctcgtccatgacctcccacgctcttgccggagccatgtcggagacggcctgcaaaaa

SEQ ID NO: 35381 - DNA, 260 bp, Unknown
  Description of Unknown: RightRegion for integrase B9382 sequence
aaaattatctttgattttgatgaacaaattgtactcagtattcagtttaaaaagaagtgattcttattggttatagaatacttgaatctcaaatcattgccctatggggatcgtatttgaaagttcaaaaataataaaatgctcaaattatgtttgaaatataacatatcacactgctatactaggcattgttggatgagccataaatcataacacttgtaaatcaatatcatccaacacttttattccatgagctggcg

SEQ ID NO: 35382 - DNA, 260 bp, Unknown
  Description of Unknown: RightRegion for integrase B9383 sequence
cgctttattcggagaattgacgcagatgacgacggcgcgttttttgtaacgccccgttaggcatatttgaccttcgtgttcacaaaggtaaattatgcccaaaagaacacccccgccttacgacgggggtgccctcatttttcgagctttcgcatcacgctattgtacacgcgctcattgacgattttaaggctgtccatcagctcgtccatgacctcccacgctcttgccggagccatgtcggagacggcctgcaaaaa

SEQ ID NO: 35383 - DNA, 260 bp, Unknown
  Description of Unknown: RightRegion for integrase B9384 sequence
cgctttatccggcaaattgacgcagatgacgacggcgcgttttttgtaacgccacgttaggcatatttgacctttgtgttcccaaaggtaaattatgcccaaaaggacacccccgccttacgacgggggtgtcctcatttttcgagtttccgcatgacgctgttgtacacgcgctcgttgacgattttaaggctgtccatcagctcgtccataatctcccacgccttgacgctgtccatgccgctgacggcaagcaaaaa

SEQ ID NO: 35384 - DNA, 260 bp, Unknown; identical to SEQ ID NO: 35359
  Description of Unknown: RightRegion for integrase B9385 sequence

SEQ ID NO: 35385 - DNA, 260 bp, Unknown
  Description of Unknown: RightRegion for integrase B9386 sequence
cgctttatccggagaattgacgcagatgacgacggcgcgttttttgtaacgccacgttaggcatatttgacctttgtgttcccaaaggtaaattatgcccaaaagaatcccccgccttacgacgggggtgttcttatttttcgagcttccgcatcacgctgttgtacacgcgctcgttgacgattttaaggctgtccatcagctcgtccatgacctcccacgctcttgccggagccatgtcggagacggcctgcaaaaaa

SEQ ID NO: 35386 - DNA, 260 bp, Unknown; identical to SEQ ID NO: 35348
  Description of Unknown: RightRegion for integrase B9387 sequence

SEQ ID NO: 35387 - DNA, 260 bp, Unknown
  Description of Unknown: RightRegion for integrase B9388 sequence
cgctttatccggaggattgatgcagatgacgacggcgcgttttttgtaacgccccgttaggcatatttgaccttcgtgttcctaaaggtaaactatgcccaaaaagacacccccgccttacgacgggggtgttctcatttttcgatcttccgcatgacgctattatagacgcgctcgtttacgattttcaagctgtccatcagctcgtccataatctcccacgccttgtccggcggaacatccgccactgcgcgcagaaa

SEQ ID NO: 35388 - DNA, 75 bp, Unknown
  Description of Unknown: RightRegion for integrase B9389 sequence
attcgccggattgtagtttcagaaaacggcgacatcttttttgaacttgtttggctataaagaaccttaacaccg

SEQ ID NO: 35389 - DNA, 260 bp, Unknown
  Description of Unknown: RightRegion for integrase B9390 sequence
cgcttcatcagaaggattgatgcagacaacgatggcgcgttttttgtaacgccgcgttaggcatattttactttcacgttcgcaaaggtaaagtatgcctaaaagataccccccgcctttgtgacgggggtatcctcatttttcaagcttctgcatgacgctgttgtatacgcgctcgttgaccactttgagactgtccattagctcatccatgaccgcccacgccttaacgctgtccatgccgctgacggcgagcaaaa

SEQ ID NO: 35390 - DNA, 260 bp, Unknown
  Description of Unknown: RightRegion for integrase B9391 sequence
cgcttcatcaggcggattgatgcagacaacgatggcgcgtttttcgtaacaccccgttaggcatattttaccttcacggacataaagggcaaatatgcctaaaaaatcccccgccgtaaatgacgggggatttttcacttttccagcttgcgcataacgctgttatacactcgctcgttgacgaccttcaagctgtccatgagttcgtccatcacttcccacgcacgggccgggtcaacgcgggccaccgcgcggaggaa

SEQ ID NO: 35391 - DNA, 260 bp, Unknown
  Description of Unknown: RightRegion for integrase B9392 sequence
cgcttcatcaggcggattgatgcagacaacgatggcgcgttttttgtaacaccgcgttaggcatattttaccttcatggacataaagggcaaatatgcctaaaaaatcccccgccgtaaatgacgggggatttttcacttttccagcttgcgcataacgctgttatacactcgctcgttgacgaccttcaagctgtccatgagttcgtccatcacttcccacgcacgggccgggtcaacgcgggccaccgcgcggaggaa

SEQ ID NO: 35392 - DNA, 260 bp, Unknown
  Description of Unknown: RightRegion for integrase B9393 sequence
ataattacaagggagcaggtagtggaatggctgaaagagatgaaaaggcttgacctttaattggacgacagtaaacgcaaacttgtagatacctttgtaaattcagtttatctgtacgatgacaaggttgtcatcatctttaattgtagggaaggggcgagtacactcgccctccctttggacgatacttcggcttgtatgcgaattggggagccaaaacaaaaacatacaaaccgtttcgataatatgcggctgtatgg

SEQ ID NO: 35393 - DNA, 260 bp, Unknown; identical to SEQ ID NO: 35369
  Description of Unknown: RightRegion for integrase B9394 sequence

SEQ ID NO: 35394 - DNA, 260 bp, Unknown
  Description of Unknown: RightRegion for integrase B9395 sequence
cgcacgatccagcgcatcgacgcagacaatgacggtgcgttttttgtaacgccaagttagtcttattttcatgtcgcaacactaactgtatatccgaaatatttttgcaaggtctccaaatcgccccggtcccaggctacctcgatggcgtggcggatggcccgctccacccgggaaggcgttgtggcgaaccgcttggccacttcaggatagagaaccttcgtcaccgcgttgatgacatccatatcccgcaccgtgat

SEQ ID NO: 35395 - DNA, 260 bp, Unknown
  Description of Unknown: RightRegion for integrase B9396 sequence
cgctttatccggagaattgacgcagatgacgacggcgcgttttttgtaacgccacgttaggcatatttgaccttcgtgttcccaacggtaaattatgcccaaaagatacccccgccttacgacgggggtgttctcatttttcgagtttgcgcatgacgctattatagacgcgctcgtttacaattttcaagctctccatcagctcgtccatgatctcccatgccttgtccggcggaacatctgccactgcgcgcagaaaa

SEQ ID NO: 35396 - DNA, 260 bp, Unknown; identical to SEQ ID NO: 35193
  Description of Unknown: RightRegion for integrase B9397 sequence

SEQ ID NO: 35397 - DNA, 260 bp, Unknown
  Description of Unknown: RightRegion for integrase B9398 sequence
cgctttattcggagaattgacgcagatgacgacggcgcgttttttgtaacgccccgttaggcatatttgaccttcgtgttcccaaaggtaaattatgcccaaaagaatcccccgtcttacgacgggggactctcatttttcgagcttccgcatcacgctgttgtacacgcgctcattgacaattttaaggctgtccatcagctcatccatgacctcccacgctcttgccggatccatgttagagacggcctgcaaaaaat

SEQ ID NO: 35398 - DNA, 260 bp, Unknown
  Description of Unknown: RightRegion for integrase B9399 sequence
cgcttcatcagaaggattgatgcagacaacgatggcgcgtttttcgtaacgccgcgttaggcatattttactttcacgttccaagaggtaaattatgcccaaaagaatcccccgccttacgacgggggtattctcatttttcgagtttgcgcatgacgctattatagacgcgctcgtttacaattttcaagctgtccatcagctcgtccatgattccccacgccttgtctggcggaacgtctgccaccgcgcgcaaaaat

SEQ ID NO: 35399 - DNA, 260 bp, Unknown
  Description of Unknown: RightRegion for integrase B9400 sequence
cgcacgatccagcgcatcgacgcagacaatgacggtgcgttttttgtaacgccaagttagtcttattttcacgtcacaacgcctacattaaaatataactaaccccccggcatttgccgagggggttaagtttagctttccaatttccgcatgacgctattgtaaacccgcgcatttactactttcaagctgtccatcagctcgtccatgacctcccacgcacgggctgggtcaacgttggacaccgcccggaggaattc

SEQ ID NO: 35400 - DNA, 260 bp, Unknown
  Description of Unknown: RightRegion for integrase B9401 sequence
cgctttatccggagaattgacgcaaatgacgacggcgcgttttttgtaacgccccgttaggcatatttgaccttggtgttccaaaaggtaaattatgcccaaaagaatacccccgccttacgacgggggtgttctcattttccgagtttccgcatcacgctgttgtacacgcgctcgttgacgattttaaggctgtccatcagctcgtccatgacctcccacgctcttgccggagacatgccggagacggcctgcaaaaa

SEQ ID NO: 35401 - DNA, 109 bp, Unknown
  Description of Unknown: RightRegion for integrase B9402 sequence
cgctttatccggagaattgacgcagatgacgacggcgcgttttttgtaacgccacgttaggcatatttgcccttggtatttgacaccgtgtagccgaagtagcgctgga

SEQ ID NO: 35402 - DNA, 260 bp, Unknown
  Description of Unknown: RightRegion for integrase B9403 sequence
cgctttatccggagaattgacgcagatgacgacggcgcgttttttgtaacgccccgttaggcatatttgaccttggtgttcacaaaggtaaattatgcccaaaagaatccccccgccttacgacgggggtgttcttatttttcgagcttccgcatcacgctgttgtacacgcgctcgttgacgattttaaggctgtccatcagctcgtccatgacctcccacgctcttgccggagccatgtcagagacggcctgcaaaaa

SEQ ID NO: 35403 - DNA, 260 bp, Unknown; identical to SEQ ID NO: 35348
  Description of Unknown: RightRegion for integrase B9404 sequence

SEQ ID NO: 35404 - DNA, 260 bp, Unknown
  Description of Unknown: RightRegion for integrase B9405 sequence
cgctttatccggagaattgacgcagatgacgacggcgcgttttttgtaacgacccgttaggcatatttgaccttggtgttccaaaaggtaaattatgcccaaaaggacacccccgccttacgacggggggtgttcttatttttcgagctttcgcatcacgctgttgtacacgcgctcattgacgattttaaggctgtccatcagctcgtccatgacctcccacgctcttgccggagccatgtcagagacggcctgcaaaa

SEQ ID NO: 35405 - DNA, 260 bp, Unknown
  Description of Unknown: RightRegion for integrase B9406 sequence
gagcaagctataaaaaagtcattagttaattatttgaggggcggtaatattaatggctaaagttacaattatcccctcaaagaaaaatccaataaccttaactccaatcaatgaaattattaaaaagaaggttgctgcttatgctcgtgtttcaactgatagtgatgagcaatttacttcatttgattcacaatgtaaggtctatgaagattacattaaaagtaaacctgattgggaatttgtaaaagtctatgctgatg

SEQ ID NO: 35406 - DNA, 260 bp, Unknown
  Description of Unknown: RightRegion for integrase B9407 sequence
cgctttatccggagaattgacgcagatgacgacggcgcgttttttgtaacgccacgttaggcatatttgaccatcgtgttcccaaaggtaaattatgcccaaaagaatcccccgccttacgacgggggtgttcttatttttcgagcttccgcatgacgctgttgtatacgcgctcgttcacaattttcaaactgtccatcagctcgtccatgatttcccacgccttgtccggtggaacatctgccactgcgcgtagaaaa

SEQ ID NO: 35407 - DNA, 260 bp, Unknown
  Description of Unknown: RightRegion for integrase B9408 sequence
cgcttcatcaagcggattgatgcagacaacgatggcgcgtttttcgtaacgccacgttaggcatatttccccttggcggacacaaagggtaagtatgcctaaaaatcccccgccgtaaatgacgggggattttttacctatcgagtttacgcatgacgctgttgtagacgcgctcgttaacaactttcaaactgtccatcagttcgtccataaccgcccatgccacacttggctcaacagctgatacggcccgcagaaag

SEQ ID NO: 35408 - DNA, 260 bp, Unknown
  Description of Unknown: RightRegion for integrase B9409 sequence
cgctttattcggagaattgacgcagatgacgacggcgcgttttttgtaacgccccgttaggcatatctgaccttcgtgttcccaaaggtaaattatgcccaaaagaacacccccgccttacgacgggggtgttctcatttttcgagcttccgcatcacgctgttgtacacgcgctcgttgacgattttaaggctgtccatcagctcgtccatgacctcccacgctcttgccggagccatgttagagacggcctgcaaaaa

SEQ ID NO: 35409 - DNA, 260 bp, Unknown
  Description of Unknown: RightRegion for integrase B9410 sequence
cgcacgatccagcgcatcgacgcagacaatgacggtgcgttttttgtaacgcccagttagtcttattttcatgtcacaacgcctacgttaaaatataactaaccccccggcatttgccgaggggttaagtttagctttccaatttccgcatgacgctattgtaaacccgctcgttgaccactttcaagctgtccatcagctcgtccatgacctcccacgcacgggctgggtcaacgttagacaccgcccggaggaaatcg

SEQ ID NO: 35410 - DNA, 260 bp, Unknown; identical to SEQ ID NO: 35367
  Description of Unknown: RightRegion for integrase B9411 sequence

SEQ ID NO: 35411 - DNA, 260 bp, Unknown
  Description of Unknown: RightRegion for integrase B9412 sequence
cgcttcatccggagaattgacgcagatgccgacggcgcgttttttgtaacgccccgttaggcatatttgaccttcgttttcccaaaggtaaattatgcccaaaagaatcccccgccttacgacgggggtgttctcatttttcgagcttacgcatgacgctattatagacgcgctcgttcacaattttcaaactgtccatcagctcgtccatgatctcccacgccttgtccggcggaatatctgccactgcgcgcaggaag

SEQ ID NO: 35412 - DNA, 260 bp, Unknown
  Description of Unknown: RightRegion for integrase B9413 sequence
cgctttatccggagaattgacgcagatgacgacggcgcgttttttgtaacgccccgttaggcatatttgaccttggtgttaccaaaggtaaattatgcccaaaagaatcccccgccttacgacgggggtgttcttatttttcgagcttccgcatcacgctgttgtacacgcgctcgttgacgattttaaggctgtccatcagctcgtccatgacctcccacgctcttgctggagccatgccggagacggcctgcaaaaaa

SEQ ID NO: 35413 - DNA, 260 bp, Unknown; identical to SEQ ID NO: 35369
  Description of Unknown: RightRegion for integrase B9414 sequence

SEQ ID NO: 35414 - DNA, 260 bp, Unknown
  Description of Unknown: RightRegion for integrase B9415 sequence
cgctttatccggagaattgacgcagatgacgacggcgcgttttttgtaacgccacgttaggcatatttgaccttggtgttcctaaaggtaaattatgcccaaaagatacccccgccttacgacgggggtgttctcatttttcgagcttccgcatcacgctgttgtatacgcgctcgttgacgattttaaggctgtccatcagctcgtccatgacctcccacgccttgacgctgtccatgccgctgacggcaagcaaaaat

SEQ ID NO: 35415 - DNA, 260 bp, Unknown; identical to SEQ ID NO: 35414
  Description of Unknown: RightRegion for integrase B9416 sequence

SEQ ID NO: 35416 - DNA, 185 bp, Unknown
  Description of Unknown: RightRegion for integrase B9417 sequence
gagcaagctataaaaaagtcattagttaattatttgaagggtggtaatattaatggctaaagttacaattatcccttcgaagaaaaatccaataaccttaactccaatcaatgaaattattaaaaagaaagttgctgcttatgctcgtgtttcaactgatagtgatgagcaatttacttcatttg

SEQ ID NO: 35417 - DNA, 260 bp, Unknown
  Description of Unknown: RightRegion for integrase B9418 sequence
cgctttatcaggcggattgatgcagacaacgatggcgcgtttttcgtaacgccgcgttaggcatactttaccttcacgtccgccaagggcaagcccaccaacagtgaattcatcgccatgatcgccgaccggcttcagcttcggatgaagcgcggccacgcgtaacaccgcacacgacctttgcccggcaggacaagagggggagaaaccacggggacgcgccgtccccgtggttttctatcctttaggcggcatctcgt

SEQ ID NO: 35418 - DNA, 260 bp, Unknown
  Description of Unknown: RightRegion for integrase B9419 sequence
cgctttatccggagaattgacgcagatgacgacggcgcgttttttgtaacgccacgttaggcatatttgcccttggcgttcccaaaggtaaattttgcccaaaagaatcccccgccttacgacgggggtgttcttatttttcgagcttccgcatcacgctgttgtacacgcgctcgtttacgattttcaagctgtccatcagctcgtccatgatctcccacgccttgtccggtgaaacatctgccactgcgcgcaaaaaa

SEQ ID NO: 35419 - DNA, 260 bp, Unknown; identical to SEQ ID NO: 35391
  Description of Unknown: RightRegion for integrase B9420 sequence

SEQ ID NO: 35420 - DNA, 260 bp, Unknown
  Description of Unknown: RightRegion for integrase B9421 sequence
cgcttcatcaggaggattgatgcagacaacgatggcgcgtttttcgtaacgccgcgttaggcatattttactttcacgttcgcaaaggtaaagtatgcctaaaagatacccccgcctttgtgacgggggtatcctcatttttcaagtttctgcatgacgctgttgtatacgcgctcgtttacaattttcaaactgtccatcagctcgtccatgatcttccacgccttgtccggcggaacatctgccactgcgcgcagaaa

SEQ ID NO: 35421 - DNA, 260 bp, Unknown
  Description of Unknown: RightRegion for integrase B9422 sequence
cgcttcatcaggcggattgatgcagacaacgatggcgcgtttttcgtaacgccccgttaggcatattttaccttcatggacgcaaagggtaagtatgcctaaaaaatcccccgccgtaaatgacgggggatttccctattccagcttgcgcatgacgctgttatacactcgctcgttgacgaccttcaagctgtccatgagttcgtccatcacttcccacgcacgggccgggtcaacgcgggccaccgcgcggaggaaat

SEQ ID NO: 35422 - DNA, 260 bp, Unknown
  Description of Unknown: RightRegion for integrase B9423 sequence
cgcttcatcagaaggattgatgcagacaacgatggcgcgtttttcgtaacgccacgttaggcatatttgaccttcgtgttccacaaggtaaattatgcccaaaagaatacccccgccttacgacgggggtattctcatttttcgagcttgcgcatgacactattatagacgcgctcgtttacgattttcaagctgtccatcagctcgtccatgatgccccacgccttttcttgtgagactttcgacacggcgcgtagaaa

SEQ ID NO: 35423 - DNA, 260 bp, Unknown
  Description of Unknown: RightRegion for integrase B9424 sequence
cgctttatccggagaattgatgcagataacgacggcgcgttttttgtaacgccccgttaggcatatttgaccttcgtgttcttaaaggtaaattatgcccaaaagaatcccccgccttacgacgggggtattctcatttttcgagcttgcgcatgacgctattatagacgcgctcgttcacaattttcaaactgtccatcagctcgtccataatcacccacgccttgcccggcggaacatctgccactgcgcgcagaaaa

SEQ ID NO: 35424 - DNA, 260 bp, Unknown
  Description of Unknown: RightRegion for integrase B9425 sequence
cgctttatccggagaattgacgcagatgacgacggcgcgttttttgtaacgccccgttaggcatatttgactttcgtgttcccaaaggtaaattatgcccaaaagaacacccccgccttacgacgggggtgttctcatttttcgagtttccgcatcacgctgttatacacgcgctcgttgacgattttaaggctgtccatcagctcgtccatgacctcccacgctcttgccggagccatgtcggagacggcctgcaaaaa

SEQ ID NO: 35425 - DNA, 260 bp, Unknown
  Description of Unknown: RightRegion for integrase B9426 sequence
cgcttcatcaggcggattgatgcagacaacgatggcgcgtttttcgtaacgccccgttaggcatattttaccttcacggacataaagggcaagtatgcctaaaaaatcccccgccgtaaatgacgggggatttccctattccagcttgcgcataacgctgttatacactcgctcgttgacgaccttcaagctgtccatgagttcgtccatcacttcccacgcacgggccgggtcaacgcgggccaccgcgcggaggaaat

SEQ ID NO: 35426 - DNA, 260 bp, Unknown
  Description of Unknown: RightRegion for integrase B9427 sequence
attcgccggattgtagtttcagaaaacggcgacatcttttttgaacttgtttggctataaagaaccttaacccctgttagcgtataatatagctaaacaggggatgcatagtgcatcccctaaaatatagtttactgctttttcagcttttccagcggcagagataatcatagttggatcattttttagaactcgcatccaactttgaagatatgcagcgctatttcggaaagaagcttttgtttctatccctacatggg

SEQ ID NO: 35427 - DNA, 260 bp, Unknown; identical to SEQ ID NO: 35356
  Description of Unknown: RightRegion for integrase B9428 sequence

SEQ ID NO: 35428 - DNA, 260 bp, Unknown
  Description of Unknown: RightRegion for integrase B9429 sequence
attcgccggattgtaatttcagaaaacggcgacatcttttttgaacttgtttggctataaggaaccttaacacctgttagcgtataatatagctaaacaggggatgcattatgcatcccctaaaatatagtttactgctttttcagctttgccagcggcagagactatcatagttggatcattttttagaacttgcatccaaccttgaagatatgcagcgctatttcggaaagaagctcttgtttctatccctacatggg

SEQ ID NO: 35429 - DNA, 260 bp, Unknown
  Description of Unknown: RightRegion for integrase B9430 sequence
cgctttatccggagaattgacgcagatgacgacggcgcgttttttgtaacgccccgttaggcatatttgaccttcgcgttcacaaaggtaaattatgcctaaaagaatcccccgccttacgacgggggtgttctcatttttcgagcttccgcatcacactgttgtacactcgctcgttcacgattttcaagctgtccatcagctcgtccatgatctcccatgccttgacgctgtccatgccgctgacggcaagcaaaaat

SEQ ID NO: 35430 - DNA, 260 bp, Unknown; identical to SEQ ID NO: 34973
  Description of Unknown: RightRegion for integrase B9431 sequence

SEQ ID NO: 35431 - DNA, 260 bp, Unknown
  Description of Unknown: RightRegion for integrase B9432 sequence
cgctttatccggagaattgacgcagatgacgacggcgcgttttttgtaacgccacgttaggcatatttgcccttggtgttcccaaaggtaaattttgcccaaaagaatcccccgccttacgacgggggtgttcttatttttcgagcttccgcatcacgctgttgtacacgcgctcgtttacgattttcaagctgtccatcagctcgtccatgatctcccacgccttgtccggtgaaacatctgccactgcgcgcaaaaaa

SEQ ID NO: 35432 - DNA, 260 bp, Unknown
  Description of Unknown: RightRegion for integrase B9433 sequence
cgctttatccggagaattgacgcagatgacgacggcgcgttttttgtaacgccccgttaggcatatttgcccttggtgttccaaaaggtaaattatgcccaaaaggacacccccgccttacgacgggggtgttctcatttttcgagcttccgcatgacgctgttgtacacgcgctcgttgacgattttaaggctgtccatcagctcgtccatgacctcccacgctcttgccggagccatgtcggagacggcctgcaaaaa

SEQ ID NO: 35433 - DNA, 260 bp, Unknown; identical to SEQ ID NO: 35366
  Description of Unknown: RightRegion for integrase B9434 sequence

SEQ ID NO: 35434 - DNA, 260 bp, Unknown
  Description of Unknown: RightRegion for integrase B9435 sequence
cgctttatccggagaattgacgcagatgacgagggcgcgttttttgtaacgccccgttaggcatatttgcccttggtgttccaaaaggtaaattatgcccaaaagaatccccccgtcttacgacggggggtgttctcatttttcgagcttccgcatcacgctgttgtacacgcgttcattgacgattttaaggctgtccatcagctcatccatgacctcccacgctcttgccggagacatggcggagacggcctgcaaaa

SEQ ID NO: 35435 - DNA, 109 bp, Unknown
  Description of Unknown: RightRegion for integrase B9436 sequence
cgcacaatccagcgcatcgacgcagacaatgacggtgcgttttttgtaacgccaagttagtcttattttcatgtcgcaacactaactgtatatccgaaatatttttgca

SEQ ID NO: 35436 - DNA, 260 bp, Unknown
  Description of Unknown: RightRegion for integrase B9437 sequence
cgctttattcggagaattgacgcagatgacgacggcgcgttttttgtaacgccacgttaggcatatttgaccttggtgttaccaaaggtaaattatgcccaaaagaatcccccgccttacgacgggggtgttcttatttttcgagcttccgcatcacgctgttgtacacgcgctcgttgacgattttaaggctgtccatcagctcgtccatgacctcccacgctcttgctggagccatgccggagacggcctgcaaaaaa

SEQ ID NO: 35437 - DNA, 260 bp, Unknown
  Description of Unknown: RightRegion for integrase B9438 sequence
cgcttcatcaggcggattgatgcagacaacgatggagcgtttttcgtaacgccccgttaggcatattttaccttcacggacataaagggcaagtatgcctaaaaaatcccccgccgtaaatgacgggggatttccctattccagcttgcgcatgacgctgttatacactcgctcgttgacgaccttcaagctgtccatgagttcgtccatcacttcccacgcacgggccgggtcaacgcgggccaccgcgcggaggaaat

SEQ ID NO: 35438 - DNA, 260 bp, Unknown
  Description of Unknown: RightRegion for integrase B9439 sequence
cgcacgatccagcgcatcgacgcagacaatgacggtgcgttttttgtaacgcccagttagtcttattttcatgtcacaacacctacgttaaaatataactaaccccccggcatttgccgagggggttaagtttagctttccaatttccgcatgacgctattataaacccgctcgttgaccactttcaagctgtccatcagctcgtccatgacctcccacgcacgggctgggtcaacgttagacaccgcccggaggaaatc

SEQ ID NO: 35439 - DNA, 260 bp, Unknown
  Description of Unknown: RightRegion for integrase B9440 sequence
cgctttatccgaagaattgacgcagatgacgacggcgcgttttttgtaacgccccgttaggcatatttgcccttggtgttcccaaaggtaaattatgcccaaaagacacccccgccttacgacgggggtgttctcatttttcgagcttccgcatcacgctattatagacgcgctcgttgacgattttaaggctgtccatcagctcgtccatgacctcccacgctcttgccggagccatgtcggagacggcctgcaaaaaa

SEQ ID NO: 35440 - DNA, 260 bp, Unknown
  Description of Unknown: RightRegion for integrase B9441 sequence
cgctttatccggagaattgacgcagatgacgacggcgcgttttttgtaacgcctcgttaggcatatttgaccttcgtgttcccaaaggtaaattatgcccaaaagaacacccccgccttacgacgggggtgttctcatttttccagcttccgcatcacgctgttgtacacgcgctcgttgacgattttcaggctgtccatcagctcgtccatgacctcccacgctcttgccggagccatgtccgagacggcctgcaaaaa

SEQ ID NO: 35441 - DNA, 260 bp, Unknown
  Description of Unknown: RightRegion for integrase B9442 sequence
cgcacgatccagcgcatcgacgcagacaatgacggtgcgttttttgtaacgcccagttagttttattttcatgtcacaacgcctacgttaaaatataactaaccccccggcatttgccgagggggttaagtttagctttccaatttccgcatgacgctattgtaaacccgcgcatttaccactttcaagctgtccatcaactcgtccatgacctcccacgcacgggctgggtcaacgttagacaccgcccggaggaattc

SEQ ID NO: 35442 - DNA, 260 bp, Unknown; identical to SEQ ID NO: 35431
  Description of Unknown: RightRegion for integrase B9443 sequence

SEQ ID NO: 35443 - DNA, 260 bp, Unknown
  Description of Unknown: RightRegion for integrase B9444 sequence
cgcttcatcaggaggattgatgcagacaacgatggcgcgttttttgtaacgccgcgttaggcatattttactttcacgttcgcaaaggtaaagtatgcctaaaagataccccccgcctttgtgacgggggtatcctcatttttcaagcttctgcatgacgctgttgtatacgcgctcgttgaccactttgagactgtccattagctcatccatgaccgcccacgccttaacgctgtccatgccgctgacggcgagcaaaa

SEQ ID NO: 35444 - DNA, 260 bp, Unknown
  Description of Unknown: RightRegion for integrase B9445 sequence
cgcttcatcaggcggattgatgcaaacaacgatggcgcgtttttcgtaacgccgcgttaggcatattttgccttcatgctatcgacagtaaaatacacctaaaaaatcccccgccgtttggcaggggatttttctattccagcttgcgcatgacgctgttatacactcgctcattgacaaccttcaagctgtccatcagctcgtccataacaatccatgcgcgggcatcatccacgcgggagaccgcgcggagaaaatcg

SEQ ID NO: 35445 - DNA, 260 bp, Unknown
  Description of Unknown: RightRegion for integrase B9446 sequence
cgcacgatccagcgcatcgacgcagacaatgacggtgcgttttttgtaacgccaagttagtcttattttcatgtcacaacgcctacgtcaaaatataactaaccccccggcatttgccgagggggttaagtttagctttccaatttccgcatgacgctattataaacccgctcgttgaccactttcaagctgtccatcagctcgtccatgacctcccacgcacgggctgggtcaacgttagacaccgcccggaggaaatc

SEQ ID NO: 35446 - DNA, 260 bp, Unknown
  Description of Unknown: RightRegion for integrase B9447 sequence
attcgccggattgtaatttcagaaaacggcgacatcttttttgagcttgtttggctataaagaaccttaacaccagttaacgtataatatggctaaataggggatgcactacgcatcccctaaaatatagtttactgctttttcagctttgccagcggcagagactatcatagttggatcattttttagaactcgcatccaactttgaagatatgcagcactatttcggaaagaagctcttgtttctatccctacatggg

SEQ ID NO: 35447 - DNA, 260 bp, Unknown
  Description of Unknown: RightRegion for integrase B9448 sequence
cgcttcatcaggcggattgatgcagacaacgatggcgcgtttttcgtaacgccccgttaggcatattttaccttcacggacataaaggacaaatatgcctaaaaaatcccccgccgtaaatgacgggggattttttacttttccagcttgcgcataacgctgttatacactcgctcgttgacgaccttcaagctgtccatcagctcgtccatgatctcccatgccttgtccggtgaaacatctgccactgcgcgcaggaa

SEQ ID NO: 35448 - DNA, 260 bp, Unknown
  Description of Unknown: RightRegion for integrase B9449 sequence
cgctttatccggagaattgacgcagatgacgacggcgcgttttttgtaacgccccgttaggcatatttgaccttggtgttcccaaaggtaaattatgcccaaaagaatccccccgtcgtaagacgggggggtgttctcatttttcgagcttccgcatcacgctgttgtacacgcgctcgttgacgatttttaggctgtccatcagctcgtccatgacctcccacgctcttgccggagccatgtcggagacggccttcaaa

SEQ ID NO: 35449 - DNA, 260 bp, Unknown
  Description of Unknown: RightRegion for integrase B9450 sequence
cgcttcatcaggcggattgatgcagacaacgatggcgcgttttttgtaacaccgcgttaggcatattttaccttcatggacataaagggcaaatatgcctaaaaaatcccccgccgtagatgacgggggatttttcacttttccagcttgcgcataacgctgttatacactcgctcgttgacgaccttcaagctgtccatgagttcgtccatcacttcccacgcacgggccgggtcaacgcgggccaccgcgcggaggaa

SEQ ID NO: 35450 - DNA, 260 bp, Unknown; identical to SEQ ID NO: 35362
  Description of Unknown: RightRegion for integrase B9451 sequence

SEQ ID NO: 35451 - DNA, 260 bp, Unknown
  Description of Unknown: RightRegion for integrase B9452 sequence
cgctttatccggagaattgacgcagatgacgacggcgcgttttttgtaacgccacgttaggcatatttgaccttcgtgttcccaaaggtaaattatgcccaaaagaacacccccgccttacgacgggggtgttctcatttttccagcttccgcattacgctgttgtacacgcgctcgtttacgattttaaggctgtccatcagctcgtccatgacctcccacgctcttgccggagccatgtcggagacggcctgcaaaaa

SEQ ID NO: 35452 - DNA, 260 bp, Unknown
  Description of Unknown: RightRegion for integrase B9453 sequence
attcgccggattgtagtttcagaaaacggcgacatcttttttgaacttgtttggctataaagaaccttaacacctgttaatgtataatatagctaaataggggatgcattatgcaccccctaaaatatagtttactgctttttcagctttgccagcggcagagattatcatagttggatcattttttagaactcgcatccaactttgaagatatgcagcgctatttcggaaagaagctcttgtttctatccctacatggg

SEQ ID NO: 35453 - DNA, 260 bp, Unknown
  Description of Unknown: RightRegion for integrase B9454 sequence
cgcacgattcagcgcatcgacgcagacaatgacggtgcgttttttgtaacgcccagttagttttattttcatgtcgcgttccctacgttaaaatataactaaccccccggcatttccgaggggttaagtttagctttccaatttccgcatgacgctattataaacccgctcgtttaccactttcaagctgtccatcagctcgtccatgacctcccacgcacgggttgggtcaacgttagataccgcccggaggaaatcgc

SEQ ID NO: 35454 - DNA, 260 bp, Unknown; identical to SEQ ID NO: 35193
  Description of Unknown: RightRegion for integrase B9455 sequence

SEQ ID NO: 35455 - DNA, 260 bp, Unknown
  Description of Unknown: RightRegion for integrase B9456 sequence
cgctttatccgaagaattgacgcagatgacgacggcgcgttttttgtaacgccccgttaggcatatttgaccttcgtgttcccaaaggtaaagtatgcccaaaaggacacccccgccttacgacggggggtgttctcatttttcgagcttccgcatcacgctgttgtacacgcgctcattgacgatttttaggctgtccatcagctcgtccatgacctcccacgctcttgccggagccatgttagagacggcctgcaaaa

SEQ ID NO: 35456 - DNA, 260 bp, Unknown; identical to SEQ ID NO: 35192
  Description of Unknown: RightRegion for integrase B9457 sequence

SEQ ID NO: 35457 - DNA, 81 bp, Unknown
  Description of Unknown: RightRegion for integrase B9458 sequence
cgctttatccagagaattgacgcagatgacgacggcgcgttttttgtaacgccacgttaggcatatttgaccttcgtgttc

SEQ ID NO: 35458 - DNA, 260 bp, Unknown
  Description of Unknown: RightRegion for integrase B9459 sequence
cgcacgatccagcgcatcgacgcagacaatgacggtgcgttttttgtaacgcccagttagtcttattttcatgtcacaacgtctacgttaaaatataactaaccccccggcatttgccgagggggttaagtttagctttccaatttccgcataacgctattgtaaacccgcgcatttaccactttcaagctgtccatcagctcgtccatgacctcccacgcacgggctgggtcaacgttggacaccgcccggaggaattc

SEQ ID NO: 35459 - DNA, 260 bp, Unknown
  Description of Unknown: RightRegion for integrase B9460 sequence
cgcttcattcggagaattgacgcagatgacgacggcgcgttttttgtaacgccacgttaggcatatttgaccttcgtgttccaaaaggtaaattatacctaaaagaatcccccgccttacgacgggggtgttctcatttttcgagcttccgcatcacactgttgtacacgcgctcattgacgatcttgaggtcgtccatcagctcatcaatgatctcccacgccttgtccggtggcacatcagccaccgcccgtagaaag

SEQ ID NO: 35460 - DNA, 260 bp, Unknown; identical to SEQ ID NO: 35194
  Description of Unknown: RightRegion for integrase B9461 sequence

SEQ ID NO: 35461 - DNA, 260 bp, Unknown
  Description of Unknown: RightRegion for integrase B9462 sequence
cgctttatccggagaattgatgcagatgacgacggcgcgttttttgtaacgccccgttaggcatatttgaccttcgtgttggataccgtgtagccaaaatagcgctggagcgtctcaaggtcgccgcggtcccatgcgacctcgatcgcatggcgcacagcgcgctcgacgcgcgagggcgtggtgctgtagcggcgcgcgacctcgggatagagcaccttcgtcacggcgttgatgacatccatgtcctgcacggcgat

SEQ ID NO: 35462 - DNA, 260 bp, Unknown
  Description of Unknown: RightRegion for integrase B9463 sequence
cgctttatccggagaattgacgcagatgacgacggcgcgttttttgtaacgccccgttaggcatatttgaccttggtgttcccaaaggtaaattatgcccaaaagaatccccccgccttacgacgggggtattctcatttttcgagtttccacatcacgctgttgtacacgcgctcgttgacaattttaaggctgtccatcagctcgtccatgacctcccacgctcttgctggagccatgtcggagacggtctgcaaaaa

SEQ ID NO: 35463 - DNA, 260 bp, Unknown
  Description of Unknown: RightRegion for integrase B9464 sequence
cgctttatccggagaattgacgcagatgacgacggcgcgttttttgtaacgcctcgttaggcatatttgaccttggtgttcccaaaggtaaattatgcccaaaaggacacccccgccttacgacgggggtgttctcatttttcgagcttccgcatcacgctgttgtacacgcgctcgttgacaattttaaggctgtccatcagctcgtccatgacctcccacgctcttgctggagccatgtcggagacggtctgcaaaaa

SEQ ID NO: 35464 - DNA, 260 bp, Unknown
  Description of Unknown: RightRegion for integrase B9465 sequence
cgctttatctggagaattgacgcagatgacgacggcgcgttttttgtaacgccacgttaggcatatttgaccttggcgttcccaaaggtaaattatgcccaaaagaatccccccgccttacgacgggggtgttcttatttttcgagcttccgcatcacgctgttgtacacgcgctcgtttacgattttcaagctgtccatcagctcgtccatgatctcccacgccttgtccggtgaaacatctgccactgcgcgcaaaaa

SEQ ID NO: 35465 - DNA, 260 bp, Unknown
  Description of Unknown: RightRegion for integrase B9466 sequence
cgcttcatcaggcggattgatgcagacaacgatggcgcgtttttcgtaacgccccgttaggcatattttaccttcacggacataaagggcaagtatgcctaaaaaatcccccgccgtaaatgacgggggatttccctattccagcttgcgcatgacgctgttatacactcgctcgttgacgaccttcaagctgtccatgagttcgtccatcacttcccacgcacgggccgggtcaacgcgggccaccgcgcggaggaaat

SEQ ID NO: 35466 - DNA, 260 bp, Unknown; identical to SEQ ID NO: 35448
  Description of Unknown: RightRegion for integrase B9467 sequence

SEQ ID NO: 35467 - DNA, 260 bp, Unknown; identical to SEQ ID NO: 35356
  Description of Unknown: RightRegion for integrase B9468 sequence

SEQ ID NO: 35468 - DNA, 260 bp, Unknown; identical to SEQ ID NO: 35459
  Description of Unknown: RightRegion for integrase B9469 sequence

SEQ ID NO: 35469 - DNA, 109 bp, Unknown
  Description of Unknown: RightRegion for integrase B9470 sequence
cgcacgatccagcgcatcgacgcagacaatgacggtgcgttttttgtaacgcccagttagtcttattttcatgtcacaacactaactgtatatccgaaatatttttgca

SEQ ID NO: 35470 - DNA, 260 bp, Unknown
  Description of Unknown: RightRegion for integrase B9471 sequence
cgctttatcaggcggattgatgcagacaacgatggcgcgtttttcgtaacgccgcgttaggcatattttaccttcacggacataaagggcaaatatgcctaaaaaatcccccgccgtaaatgacgggggatttttcacttttccagcttgcgcataacgctgttatacactcgctcgttgacgaccttcaagctgtccatgagttcgtccatcacttcccacgcacgggccgggtcaacgcgggccaccgcgcggaggaa

SEQ ID NO: 35471 - DNA, 260 bp, Unknown; identical to SEQ ID NO: 35348
  Description of Unknown: RightRegion for integrase B9472 sequence

SEQ ID NO: 35472 - DNA, 260 bp, Unknown
  Description of Unknown: RightRegion for integrase B9473 sequence
cgctttatccggagaattgacgcagatgacgacggcgcgttttttgtaacgccacgttaggcatatttgaccttggcgttcccaaaggtaaattatgcctaaaagaacacccccgccttacgacgggggtgttcttatttttcgagcttccgcatcacgctgttgtacacgcgctcgtttacgattttcaagctgtccatcagctcgtccatgacctcccacgctcttgccggagccatgtcggagacggcctgcaaaaa

SEQ ID NO: 35473 - DNA, 260 bp, Unknown
  Description of Unknown: RightRegion for integrase B9474 sequence
cgctttatccggagaattgacgcagatgacgacggcgcgttttttgtaacgccacgttaggcatatttgaccttcgtgttccaaaaggtaaattatgcccaaaagaatcccccgccttacgacgggggtgttctcatttttcgagcttgcgcatgacgctattatagacgcgctcgtttacgattttcaaactgtccatcagttcgtccatgatctcccacgccttgtccggtggaacatctgccactgcgcgcagaaaa

SEQ ID NO: 35474 - DNA, 109 bp, Unknown
  Description of Unknown: RightRegion for integrase B9475 sequence
cgcttcatcaggcggattgatgcagacaacgatggcgcgtttttcgtaacgccgcgttaggcatattttaccttcacggagtttaccgtatagccgaaatacttctgca

SEQ ID NO: 35475 - DNA, 260 bp, Unknown
  Description of Unknown: RightRegion for integrase B9476 sequence
attactttttatcccgaccgaaagtataatattcaggtcggcgatattttttggcgttaaaattacttacttaattgattttgttaccggtgtatagctgataatatttgcccttttgtgcaataaggtcatcatgagttccgcgctcaatgatacgtccctgctctaataccatgatacagtcgctgttcttaacggtagacagacggtgcgcgataacaaatgttgttcttccgtgcatcagcttgtccataccatcc

SEQ ID NO: 35476 - DNA, 260 bp, Unknown
  Description of Unknown: RightRegion for integrase B9477 sequence
atcacctttacccccgaccgaaagtatgacattcaggtcggcgatattttttggcgttaaaattacttacttaattgattttgttaccggtgtatagctgataatatttgcccttttgtgcaataagatcatcatgagttccgcgctcaatgatacgtccctgctctaagaccatgatacagtcgctgttcttaacggtagacagacggtgcgcgataacaaatgttgttcttccgtgcatcagcttgtccataccatcc

SEQ ID NO: 35477 - DNA, 260 bp, Unknown
  Description of Unknown: RightRegion for integrase B9478 sequence
attactttttatcccgaccgaaagtataatattcaggtcggcgatattttttggcgttaaaattacttacttaattgattttgttaccggtgtataactgataatatttgcccttttgtgcaataagatcatcatgagttccgcgctcaatgatacgtccctgctctaagaccatgatacagtcgctgttcttaacggtagacagacggtgcgcgataacaaatgttgttcttccgtgcatcagcttgtccataccatcc

SEQ ID NO: 35478 - DNA, 260 bp, Unknown
  Description of Unknown: RightRegion for integrase B9479 sequence
attactttttatcccgaccgaaagtataatattcaggtcggcgatattttttggcgttaaaattacttacttaattgattttgttaccggtgtataactgataatatttgcccttttgtgcaataagatcatcatgagttccacgctcaatgatacgtccctgctctaagaccatgatacagtcgctgttcttaacggtagacagacggtgcgcgataacaaatgttgttcttccgtgcatcagcttatccataccatcc

SEQ ID NO: 35479 - DNA, 260 bp, Unknown
  Description of Unknown: RightRegion for integrase B9480 sequence
gaagaggctagaaagcgttctttgaagcaatgggaaaatataaaaagggagggtaagtaaatggcaaaagtaacagttattccttccactaaagttagtacattctctaatgcctttaatcctgtggttaaaagaaaggttgctgcatacgctcgagtttcaacagatagtgacgagcaatttacatcttttgaggcgcaatgcaattactatgaaaactacattaattctaaacctgactgggaattagtcaaggttta

SEQ ID NO: 35480 - DNA, 260 bp, Unknown
  Description of Unknown: RightRegion for integrase B9481 sequence
cgcttcatccgccgaattgtcatcgcaaacaacggtgatatcttttttgatcttgtttagttatatagcactttaacaccagttacagtataatatagctaaacattccgaacagcgccggggttgatctccggcgttttcttttgaaaaatttgtggtttttgtaaacttcttattgacgaatcaccaaattggtggtagtataataagcgtaaggaagaaaaatacagaggggcagcgccccggaaaggatcaaaaaa

SEQ ID NO: 35481 - DNA, 260 bp, Unknown
  Description of Unknown: RightRegion for integrase B9482 sequence
cgcttcatccgccgaattgtcatcgcaaacaacggcgatatcttttttgagcttgtttagctatagagtactttaacaccggaaacggtatagccaaaaaacttttgcagcgtctccacatcaccgcggtcccacgcgacctcgatcgcgtggcggatggcacgctctacgcggctcggcgtcgtggaaaacttcttcgcgacctccggatagagcaccttcgtcacggcgttgatggcgtccatgtcgttgatcgtgag

SEQ ID NO: 35482 - DNA, 260 bp, Unknown
  Description of Unknown: RightRegion for integrase B9483 sequence
tggacagaggaaatgaaacaagccgcacgagaaaggaatcagaaatgggtcgaaaagtaactgtaataccgccaacaatcagtctgcaaacgcacctgccgacaacacagaaagtaaagcgaaaagttgccggatatgcacgtgtttctacagattttgaggagcagctcacttcctacgaggcacaggtcgattattataccaagtatattcaagagcgtgaggactgggagtttgtcaaagtctataccgatgagggc

SEQ ID NO: 35483 - DNA, 190 bp, Unknown
  Description of Unknown: RightRegion for integrase B9484 sequence
gatgtgtctgctgccatccatgcaaaaagttcggatgtggcatattctgcttcaccatgaaaaaaatcccggtgcgttacacgggcgctcataagacagtaattctaaaaattacgactatggcatctgtcaggcgggattggcaacgaaataacgggtatccggtgaaagccggatacccgttattttt

SEQ ID NO: 35484 - DNA, 260 bp, Unknown
  Description of Unknown: RightRegion for integrase B9485 sequence
cgcttcatccgccgaattgtcatcgcaaacaacggcgatatcttttttgatcttgtttagttatatagcaccttgacaccggaaacggtatagccaaaaaacttttgcagcgtctccacatcaccgcggtcccacgcgacctcgatcgcgtggcggatggcacgctccacgcggctcggcgtcgtggaaaacttcttcgcgacctccggatagagcaccttcgtcacggcgttgatggcgtccatgtcgttgatcgtgag

SEQ ID NO: 35485 - DNA, 260 bp, Unknown
  Description of Unknown: RightRegion for integrase B9486 sequence
cgcttcgtccgccgaattgtcatcgcaaacaacggtgatatcttttttgatcttgtttagttatatagcaccttaacaccagttacaatataatatagctaaacattttagagaatcgccggagttaatcttctgcgcatttgaaaatttttctgtttttcactttctggttgacattgtacgcacaatggtttacaatacaatcgcaggggcgagagatgaacgccctaagaaaggaagaacaaccatgaaaaacaatg

SEQ ID NO: 35486 - DNA, 260 bp, Unknown; identical to SEQ ID NO: 35482
  Description of Unknown: RightRegion for integrase B9487 sequence

SEQ ID NO: 35487 - DNA, 260 bp, Unknown
  Description of Unknown: RightRegion for integrase B9488 sequence
cgcttcatccgccgaattgtcatcgcaaacaacggcgatatcttttttgatcttgtttagttatatagcaccttaacaccagttacgatagaatatggctaaataatcaagagtagcgccggggtcgatcttctgcgcatttgaaaaattttctgtttttcactttctggttgacattgtacgtacaatggtttacaatacaatcacagtggcgagagatgagcgccctaagaaaggaagaacaaccatgaaaaacaatg

SEQ ID NO: 35488 - DNA, 260 bp, Unknown
  Description of Unknown: RightRegion for integrase B9489 sequence
cgcttcatccgccgaattgtcatcgcaaacaacggcgatatcttttttgagcttgtttagctatagagtactttaacgccagttacgatagaatatggctaaataatcaagagtagcgccggggttgatttcttttgaaaaaattcttgttttctaaaatttcttattgacgtatcaccaaattggtggtaatataatagacgtaaaggataaacaaccacatgggcacagcccggaaaggaaaccaaaatgaaagttat

SEQ ID NO: 35489 - DNA, 260 bp, Unknown
  Description of Unknown: RightRegion for integrase B9490 sequence
cgcttcatccgccgaattgtcatcgcaaacaacggtgatatcttttttgatctcgtttagctataaagtaccttaacaccagttacaatataatatagctaaacattcagaacagcgccggggttgatctccggcgttttcttttgaaaaatttgtggtttttgcaaaacttcttattgacgcatcaccaatttggtggtagtataataagcgtaaggaagaaaaatacagaggggcagcgccccggaaaggatcaaaaa

SEQ ID NO: 35490 - DNA, 260 bp, Unknown
  Description of Unknown: RightRegion for integrase B9491 sequence
cgcttcattcgccgaattgtcatcgcaaacaacggtgatatcttttttgatcttgtttagttatatagcaccttaacaccagttacagtataatatagctaaacattcctaacagcgccggggttgatctccggcgttttctttttgaaaaattccatttttccaaaatttcttattgacatatcaccaacttggtggtaatataatagacgcaaacagaaaatacagaggggttgagccccggaaaggaacaaaaaatg

SEQ ID NO: 35491 - DNA, 260 bp, Unknown
  Description of Unknown: RightRegion for integrase B9492 sequence
cgcttcatccgccgaattgtcatcgcaaacaacggtgatatcttttttgatctcgtttagctataaagtaccttaataccagttacaatataatatagctaaacattcagaacagcgccggggttgatctccggcgttttcttttgaaaaatttgtggtttttgcaaaacttcttattgacgcatcaccaatttggtggtagtataataagcgtaaggaagaaaaatacagaggggcagcgccccggaaaggatcaaaaa

SEQ ID NO: 35492 - DNA, 260 bp, Unknown
  Description of Unknown: RightRegion for integrase B9493 sequence
cgcttcatccgccggattgtcatcgcaaacaacggtgatatcttttttgatcttgtttagttatatagcaccttaacaccagttagtgtataatatagctaaataattcagagcggtgccggggttgatcttctgcgcttttgtaaattttctggttgacattgtacgcacaatggtttacaatgcaatcacagaggcgagagatgaacgcccgaagaaaggaagaacaaccatgaataatgacattctcaaaaattttg

SEQ ID NO: 35493 - DNA, 260 bp, Unknown
  Description of Unknown: RightRegion for integrase B9494 sequence
cgcttcatccgccgaattgtcatcgcaaacaacggcgatatcttttttgatcttgtttagttatatagcaccttaacaccagttaatatataatatggctaaacaatttagagaagcgccggggttgattccaggcgcttcttctttgcttataggtcgtttagtttgttcatgaccgcggcgtaggtctttggctgcatcacgctcaggctctccatcagctcatccatcacccgccatgcgtctcgcggctctttgtc

SEQ ID NO: 35494 - DNA, 260 bp, Unknown
  Description of Unknown: RightRegion for integrase B9495 sequence
tggacagaggaaatgaaacaagccgcacgagaaaggaatcagaaatgggtcgaaaagtaactgtaataccgccaacaatcagtctgcaaacgcacctgccgacaacacagaaagtaaagcgaaaagttgccggatatgcacgtgtttctacagattttgaggagcagctcacttcctatgaggcacaggtcgattattataccaagtatattcaagagcgtgaggactgggagtttgtcaaagtctataccgatgagggc

SEQ ID NO: 35495 - DNA, 260 bp, Unknown
  Description of Unknown: RightRegion for integrase B9496 sequence
cgcttcatccgccgaattgtcattgcaaacaacggcgaaatattttttgatctcgtttagctatagagtactttaacaccagttacagtataatatggctaaataataaatagtagcgcggggttgatctccggcgttttctaacgaagcattgaaaattgggagaacggcgtttccaagccgccggaatatgttgtacgactaatcgcgttctatcttgtgaacaaggaaaaggagggatgaaaggccctccttttcgc

SEQ ID NO: 35496 - DNA, 260 bp, Unknown
  Description of Unknown: RightRegion for integrase B9497 sequence
aatcagcatgaactggagtttcatttgataggtggattaaagtttaaagaaaaaatatagctgaaaatgctttgcaggtaaaattgcaaggcagttttttgttgctgttggtaatagcttttcagcagaaaatgtgatattattgtagtctgaaaggaggcaatgtcatggcaaagaatcgtacaatcccattcggatactgtatgaaaaacggcgagataacaaccgagccaaaagaagtttacgcagttgttgcaata

SEQ ID NO: 35497 - DNA, 260 bp, Unknown
  Description of Unknown: RightRegion for integrase B9498 sequence
acgataaaaaccgagggcatgaaaaaccttatgatggagatggaacatgaacacaattaaaactctgccggatgggaacatccaaatcaccgtcgattatgttttcgtcaagcgttccggacgcaaagagattatcatggaggaggagcagggaagaactgaaaatcttgacatgggcgtcatccgtgcattggcacgggcaaaatactggaatcggaaactggatcgcggtgaatattctaccatccatgatatttccg

SEQ ID NO: 35498 - DNA, 260 bp, Unknown
  Description of Unknown: RightRegion for integrase B9499 sequence
gaaagctggacggcggaaatgcgagagaaagcgaggcagaaaaaatggcgacagtcctaaaaataccagcaaagtttcaccccataacgcatttgccggaaatcaaggttcagaaacgcagagtggcagcctatgccagagtttccacggattccgaggagcagcagacctcctacgctgcacaggtagattgctacactaagtacattcaggaacgggcagactgggagtttgttgcagtctataccgatgagggcatt

SEQ ID NO: 35499 - DNA, 130 bp, Unknown
  Description of Unknown: RightRegion for integrase B9500 sequence
aacaccggaaaattcagaccaatccgctttagcggatattcagactcgtcattcctgtaaatttcaatttccttaatcaaggctgtgaccacatttctcttttcttcgtcatttattatattataaacgc

SEQ ID NO: 35500 - DNA, 260 bp, Unknown
  Description of Unknown: RightRegion for integrase B9501 sequence
ccggaaatgaaagaaaaggcacgacagcagtcactggcaagaaggaggcaaaaatcatgaacactgcggttcggacggttacggtgataccaccgtccatcaaccccatgacccacctaactgacacgccgctttacaaactgcgagttgctgcttacgcccgtgtttccacggacagcgatgagcagttcaccagctacgaagctcaaatcgactactacacgcagtacattcagagaaaccaggaatggacattcgta

SEQ ID NO: 35501 - DNA, 260 bp, Unknown
  Description of Unknown: RightRegion for integrase B9502 sequence
gtaaaagaaatcatcgcatacccagacggtacgttttcatttgtgttgcgtaatatataatatgtgctgcccggtggcatgccttttatgacgctcgaatacgtcctcaagcaacacggtcttacccccggtgtggatgtggaggtcatcaacaacatccagtttaacctgatgggcggcgcatttgagagcggcaccggcgatttcgttactctttttgaaccgacagcctctgaatttgaagccgcaggcaaaggaca

SEQ ID NO: 35502 - DNA, 260 bp, Unknown
  Description of Unknown: RightRegion for integrase B9503 sequence
atgcgcaaatctgccggagaaaaaacacgggaaaggaataaacgccatgccgaaagctaaaaatgtcaccgtcatccccgccacgctgaatatccataccaaaacacctaccacggaacgggtacgccgccgggtagcggcttatgcccgtgtttccacggacagcgaagagcagctcacttcctatgaagcccaagtagactattacaccaagttcatccgggaaaatccggattgggacttcgtggaggtctataccg

SEQ ID NO: 35503 - DNA, 260 bp, Unknown
  Description of Unknown: RightRegion for integrase B9504 sequence
gaagatggcagcgtactgccgagtgtcaaccgaccaagaagaacagttattaagctatgagaatcaggtcaattattacacaaattatatcagcgaaaatcctctctatgaatatgcagggacttatgcggatgaaggaatttcgggaaccaataccaaaaagagagatgaattcaaccgtatgattgctgattgcagggcagggaaaatagacatgattattactaagtccatttcccgatttgcaagaaatacgctgg

SEQ ID NO: 35504 - DNA, 260 bp, Unknown
  Description of Unknown: RightRegion for integrase B9505 sequence
caagcacaggctaagaaagaatctgaggatattgttgaactggacaaagcccaggtatgagtgcaaatccaacaatcacaggaaacctgctaattcacacgttccattgtagattgaagtcccattcctggaagcgattctgggattatgacaccttcgtggtgtagtccagggaaatccaccctgcgccagatttcagtttaccccacttcgttgctccctgcccagtactttcctgcacgatggtataaactccaccg

SEQ ID NO: 35505 - DNA, 260 bp, Unknown
  Description of Unknown: RightRegion for integrase B9506 sequence
acggatgaaatgcggcagaaagcgagagaccggacaaaagcgaggaatcagaaaaaatgacggaaaggattgtgaccgtaataccggcaacgaaagcaccgattcacatgattgccggttcgtctgcaaaaaaaaacgccgggttgccggatatgcaagggtatccacggaaaaagacgagcagtacacttcatacgaagcgcaggtggattactacacacagttcatccagagccatgccggatgggagtttgttaagg

SEQ ID NO: 35506 - DNA, 260 bp, Unknown
  Description of Unknown: RightRegion for integrase B9507 sequence
aaaagacaggtaattgaattatctgctgaaataggacgctctttacttggtgagagctgattcgctcccgatatactgtcagtttctattgataatacaaacgatttactccattaaaagaaattgaattaaatgatataaagttcaagcttgccaatcagcaaaatgcgatgggtaagcttgatttttattactcacaattcaaaacatgggctgatgaatttgataactccacaatggagcagaagaaaatgatagct

SEQ ID NO: 35507 - DNA, 260 bp, Unknown
  Description of Unknown: RightRegion for integrase B9508 sequence
ataaaggagatcactctccatcccgatgccggcatttcttttagcctccgtcagttataatcggcgtagccaaggggttataccgattataactgacaaaagagaccggagaccggtctctggctctatatcatattagtatgcccaacctctcggcaagcagctcccgccgcgcttgcggtattggtttgatcccagcgcaccaggagtgtacggcggccttgctcacctcgcaggcctcggcggcctgctccaacgtc

SEQ ID NO: 35508 - DNA, 260 bp, Unknown
  Description of Unknown: RightRegion for integrase B9509 sequence
atatccgaaattagcccgagcggcagggacttttttaacattaccgtccgtaaaccataatggacattgcccggtggcatgccttacatgacactgtgttacgttctcaagtcccatggtcttgtgccgggcgaggatgtggaggttatagacaacatacagttcccgctgatgggcggcgcgttcgagggcggcacgggggactacgttactctgtttgagcccacggcgagcgagttcgcttcgtccggcagggggca

SEQ ID NO: 35509 - DNA, 260 bp, Unknown
  Description of Unknown: RightRegion for integrase B9510 sequence
atcaagagcattaccgtacatcccgacagttcgttttcctttacccttcgtcagttataataagtagttcccggcggaaataccatttatagctgacatgaaaagccactgtagctgttggctgtttgatctggcccggaaaatacctactcatcaaagaccaaagaagaacaccatgcgctgcatggtgttcttcttcggtatccggcagctacccgttttttattcagttccttgcagtttctcgtccgtaaaaagcg

SEQ ID NO: 35510 - DNA, 260 bp, Unknown
  Description of Unknown: RightRegion for integrase B9511 sequence
gaacgtagcagcgtattgccgcgtatcaacagatcaagaagaacagttatcgagttatgagaatcaggtgcgatattacactgaggtgataaccagaaatgcggagtatgaactggttgatatttacgccgatgaaggtatctccggaactaacacaaaaaagcgtgatgacttcaatagaatgattgcagattgcagagccggaaagatagaccttatcattacaaagtccatttccagatttgccagaaacacgctgg

SEQ ID NO: 35511 - DNA, 260 bp, Unknown
  Description of Unknown: RightRegion for integrase B9512 sequence
gaaagtagcagcgtactgccgcgtgtcaacggaccaagaagaacagttatcaagttatgagaatcaggtgagatactatacggaaatcataacaagaaatcctgattatgagttagcagatatttatgcggatgaaggtatctccggtaccaacaccaaaaagcgtgatgattttaataggatgattgaggattgcaggggtgggaagatagacctcattattacaaagttgatttccagatttgcaagaaatacactgg

SEQ ID NO: 35512 - DNA, 109 bp, Unknown
  Description of Unknown: RightRegion for integrase B9513 sequence
ttaattaaaaagatagacgtatggaacgataataaaattaagatccactggaatatttaatttttgggcgctttacgccttttttcgtatattaggtatttacaattga

SEQ ID NO: 35513 - DNA, 260 bp, Unknown
  Description of Unknown: RightRegion for integrase B9514 sequence
gaaagtagcagcgtactgccgcgtgtcaacggaccaagaagaacagttatcaagttatgagaaccaggtgcgatactatacggaaatcataacaagaaatcctgattacgagttggtggacatttacgcagatgaaggcatctccggtaccaacaccaaaaagcgtgatgattttaacagaatgatcgaagattgcagagctgggaagatcgaccttattattacaaagtccatttccagatttgcaagaaataccctgg

SEQ ID NO: 35514 - DNA, 260 bp, Unknown
  Description of Unknown: RightRegion for integrase B9515 sequence
aaagagtatgaagaacaaatcaaaaagactgccgagttcattcaaaagtatgaaaagtaaaaaattgacagagtaataacagaagatgaaatcagagaacaaatcaatcatctcaaagattacttttacaaccctaagaatttaataagaacaaagtatgttctttctcagtatatagacagaattgacatctcaaacgaaaatgttcaggtgcaattcaaagtatcaatgtccccatcagataatactgatggggattg

SEQ ID NO: 35515 - DNA, 260 bp, Unknown
  Description of Unknown: RightRegion for integrase B9516 sequence
gatggaaggcttcagataaagttttatgacggaacagagtttgaagtagcaacagaatagtaaaagagccggtaggtaaattaattagaattatgagcgtagttcctaccggtttttgtattattacatatcatattggctgaggtccatttggcctccaggttcatcttccgcattttgggcggctaattcttcttttgtaatagcattttgaggctttgcacctttgtttgaatatagctgctcgaacttgagaggtt

SEQ ID NO: 35516 - DNA, 260 bp, Unknown
  Description of Unknown: RightRegion for integrase B9517 sequence
cagtcgctttctgaagtcactgagaggggtttaatagatgttgatgaggttatcatatagttgagattctatcgtcagtagcgcttgttaggattcacagaaagcttcttcaaagtactacctgtaccagcattattaagcacctttgaagcttgctcattagcggcatctgagaaggtgctttttccgttctcaactttgacacttctaccacaattgatacgggcttgaagttgctcattagtaagttcactcgtaga

SEQ ID NO: 35517 - DNA, 260 bp, Unknown
  Description of Unknown: RightRegion for integrase B9518 sequence
ggtttaataaacagaatatatttagacgggaataagatatctcatgttgattttaattgaataaagtatggctttcgatggtgtcatttgtagatgcgggtcgtaaagccatacttttttaatgttcattttgtatacataatcgtatataatacctaaaaggaaatggacaatatgacaaataaagattcaataaataaaatattatctatgttagaaagcgtaaagaatgaaatagagtcaattaggcgcgacttaaa

SEQ ID NO: 35518 - DNA, 260 bp, Unknown
  Description of Unknown: RightRegion for integrase B9519 sequence
gttggaacggacggaaagctgaccttcacgcttcggaatggcatggaaattgaagtgtaaatatatatttttaggggctgtggataccaatgtgatgcttctcacactggctcatccgcagccccctctttttttgcctatttacagccatttccgagtttcgttacaaaagtcaacgataaccccaaaaacagctcaaaatgcaccctaaatgattttcgatttttcgcaaaaatcaacgatagcttgggtaatcgttg

SEQ ID NO: 35519 - DNA, 99 bp, Unknown
  Description of Unknown: RightRegion for integrase B9520 sequence
caacacattgagaaactaaagcaggatgttgcaaaagaggagttaaaaaaaggcttataggacaaaaagtgtgtgtggcttttttaaattaatcccaat

SEQ ID NO: 35520 - DNA, 260 bp, Unknown
  Description of Unknown: RightRegion for integrase B9521 sequence
ggcttctttgtaattaaacctcgaaaggatggaaacaatgagtatcttagacaactttgatgtggttggcgtccctcgtacattcagtattgcagaggttcgaatcctgaagaaccgcatctcctttaaccttgcaacggcttctgagattggctatccgccatttgtgcggctgttcatcagcagagacaaaacacaaattgcattgcagccctgtgccaaagaaacaccgaacgcaatgaagttctttacgtcggatt

SEQ ID NO: 35521 - DNA, 260 bp, Unknown
  Description of Unknown: RightRegion for integrase B9522 sequence
cacctcgcggatggaaccatgacaccagtggggttaaccagtgaggggaggctggcatgaaccgcaccgtcaccgcgatacccgcaacaaagaaacttgggaatctcacagcctcatctggcgcaccggcacgcaggcgggtcgccgcctacgctcgcgtctctaccgagatggaagaacaaacctcctcctacgaggctcagattgactactacaccacctatattcgctcacgtaatgattggcagttcgcgggcatg

SEQ ID NO: 35522 - DNA, 260 bp, Unknown
  Description of Unknown: RightRegion for integrase B9523 sequence
cacctcgcagatggaaccatgatgccggtgggcttaaccagtgaggggtggttggcatgagtcgcacggtcacagcgatacccgcaacaaagaaacttgggaatgtcacaaccccgtccggggtaccagcgcgcagacgggtggcggcgtatgctcgcgtttctactgagatggaagaacaaacctcctcgtatgaggctcagatcgactactacaccacctacattcgctcacgtagtgattggcggttcgcggacatg

SEQ ID NO: 35523 - DNA, 260 bp, Unknown
  Description of Unknown: RightRegion for integrase B9524 sequence
aaggcaatcgagggcggtgcgctcagcgacacccctcatagagcgcctgaaccagcttgaggcgcagaaggcatccctgaacgacgcgatacaggccgagaacgtcaaggtctcgctgtgcgaggacgagcacagcatcaaggcgtacttcgagaagttccttcacgcggacttcgacaacccgcagacgcgcgataaaatattggaatatttcgtcgataagatttatctctacgacgagaagctggtcgtgacctcgt

SEQ ID NO: 35524 - DNA, 260 bp, Unknown
  Description of Unknown: RightRegion for integrase B9525 sequence
gagaaacagatcattatctgttttgcagaggagaatgaatacaaggtttgcagcttgtgagcggaagtgaacagagggcgatactatttatgctgaaattggaaattagactgaatgcagaacaaatcagtgaaggtggaaaacatactccggaagttttatatgggatgttgattcgagcatttcaaaaagaacagatagattatagtgaaaagccggatgaaacagtgctttttgtaggacgaggatgtaccaaagat

SEQ ID NO: 35525 - DNA, 260 bp, Unknown
  Description of Unknown: RightRegion for integrase B9526 sequence
gaggaaatttttgcaaaaaaaatagccactacgcaaaacaagctattgaactgcttgtaaaacgtgtgacaatcattgataagactattaccttgagcctgacaacagaaggttgtctgagcttattggtgccgcggactcgaaatggtataagcgcatatactttcaccattaccgtgaatttagcagcttagggctaaaaggcaggagtaattcctgcctttttattatatcacgttcgtaccaacattgcaattaaa

SEQ ID NO: 35526 - DNA, 260 bp, Unknown
  Description of Unknown: RightRegion for integrase B9527 sequence
aaacgaggggcttttctcgatgtttcacgtgaaatctatgctgttcgccgccacatgtaaacggccaaatatggcggcatgttgttgtgcgaaccgtccccgcctgtgtagagcgtctgaacgttgccgttgtacccgactttcgcctgtgcttggacggtcatgtaggccgtcgtattaccagcggaaacgttgtagttgtcgagtgtgtggttgtggcgcggcatctccgatgtcgtgagcttgtgcgccgattcgcc

SEQ ID NO: 35527 - DNA, 236 bp, Unknown
  Description of Unknown: RightRegion for integrase B9528 sequence
aaaatatacccaagaaagcaaagaaatatctacacaagaaattttagatacaaaagctaaactgatatatatattagaaaattatgatctagatgatgtacaatctataaggaagattttaagaatgttgataaagaaaataaaaattaatgatataaaaaaatttgattttttaatagagttgtgatatcctaaaaatagagaaattaaataaaatattatcttcagggcagggt

SEQ ID NO: 35528 - DNA, 260 bp, Unknown
  Description of Unknown: RightRegion for integrase B9529 sequence
gtttcccggcttgaaacacacgcactggagcttttgcgggccggatgggagcagccttagcttcctcttgcattcctcaccgaactgtggtacaatactaaggcacacgaatcgtgtgccttgtcggacagcgcctgctgcgtggttcggcatacggatgcgggtcctgtacgatggagccgcagtgaaccaggtcaggtggggaaccaagcagccttaagcggcgcgccccgtgcgtttcagtcagcctgcatccgtat

SEQ ID NO: 35529 - DNA, 75 bp, Unknown
  Description of Unknown: RightRegion for integrase B9530 sequence
aaacttctgactggaaacaccttcctcaacagatttctttgctggagctgctggctgtgaacttccagatgatga

SEQ ID NO: 35530 - DNA, 260 bp, Unknown
  Description of Unknown: RightRegion for integrase B9531 sequence
gaccccgcctcggccgttgccgaggaggacgaaaactttattgtaattgagaaggagtaactaccatgtttgagaaattttctgtcatcgatcttattaaaacccgttccgcctctgtctgcactttcgcaggcaatgttgtgaagttcaatgtgcagaccgcacaggagctccgcttcccagagtacatccagttcctgatcgagccgaagtcgaagcagtttgccatccgtgcctgcaaggaggacgctccgaatgcc

SEQ ID NO: 35531 - DNA, 260 bp, Unknown
  Description of Unknown: RightRegion for integrase B9532 sequence
gaacccgccccggccgttgccgaggaggatgaaaactttattgtaattgaaaaggagtaactaccatgtttgagaaattttctgttatcgatcttattaaaacccgttccgcctctgtctgcactttcgcaggcaatgttgtgaagtttaacatccagaccgcacaggagctccgcttcccggagtacatccagttcctgatcgagccgaagtcgaagcagttcgccatccgtgcctgcaaggaggacgctccgaatgcc

SEQ ID NO: 35532 - DNA, 260 bp, Unknown
  Description of Unknown: RightRegion for integrase B9533 sequence
gatatcgatgagagtaaattagattctcaaagacccatgaagacaattgttattatttgatgattagagatgggaggggttgtttcccctcccatttcatcttttatattaattttttgacattattataatgatctatgatctataatgaaagtagatcataccatacattaattaagaaaggtggttatttgttatggatagtttcactagtaagattactgttgctgctactctgttaggcaatggtgctgagtact

SEQ ID NO: 35533 - DNA, 260 bp, Unknown
  Description of Unknown: RightRegion for integrase B9534 sequence
gagatcagagagactaccgaaaagatctcagctgaaagaaaaaatggtcagtatgagtagaaaaaagaatttgtttatgagaatataaaaaaacttgccgacatctgggatgatatcagcaagtctcaaaaaaactctatactcaaaactataattgataaagtgattataggcaagggcgatatagaaattcagctaaaaaacttttagcacttacataatgcagttcctatggcattgaggtggtgctataccgcata

SEQ ID NO: 35534 - DNA, 260 bp, Unknown
  Description of Unknown: RightRegion for integrase B9535 sequence
atacagaacggctataaacacatgcttagaagtaacaatgacatggaaaatgagctgtgaaatgcaacttatacagaattaagagctgaaagagaacagcttatggataaactgtcttgtattgataaagctgatgatgatttttacaagcaatctgatttaatattgaagttctgtaagaatgcaagcagaattttcatggaagcaactccatcagaaaaaagaacaatttgtgaaataattggttcgaactttacagc

SEQ ID NO: 35535 - DNA, 260 bp, Unknown
  Description of Unknown: RightRegion for integrase B9536 sequence
gccgcaacgccagctatggcagatcacatcgaaattattaaagtcaaaggagaaaactaatatgtccgtactcgaaaaattcaagctcgtagagctcatcacctctcgcaccgactccgttgccacctttatgaacggcaaccagatcaagttcaatgccgccacctttgtggatctgggatacccggaatacatccagctcttcgtcgaagagaaaggcaagcagttcgccatcaaggcctgcaaggcagatgcgccgc

SEQ ID NO: 35536 - DNA, 260 bp, Unknown
  Description of Unknown: RightRegion for integrase B9537 sequence
gccgcaacgccagctatggcagatcacatcgaaataattaaagtcaaaggagaaaactaatatgtccgtactcgaaaaattcaagctcgtagagctcatcacctctcgcaccgactccgttgccacctttatgaacggcaaccagatcaagttcaacgctgccacctttgtggatctgggatacccggagtacatccagctcttcgtcgaagagaaaggtaagcagttcgccatcaaggcctgcaaggcagatgcgccgc

SEQ ID NO: 35537 - DNA, 260 bp, Unknown; identical to SEQ ID NO: 35535
  Description of Unknown: RightRegion for integrase B9538 sequence

SEQ ID NO: 35538 - DNA, 260 bp, Unknown; identical to SEQ ID NO: 35535
  Description of Unknown: RightRegion for integrase B9539 sequence

SEQ ID NO: 35539 - DNA, 260 bp, Unknown
  Description of Unknown: RightRegion for integrase B9540 sequence
aactccataaatgaggagatgtcaaacaacaaagaagtaaggattgaggaatttaagtagcagatcccggaagactggaaagaactttacgaacaactagatcaaaaaggaaaacaagaattttggcatagaataataaaagaaatttatttgaatgaagcctttgaaattactggctttatattttatatctaggacttgtactaagtaactattttctagcggttaacattaattagtacaagtctattaaaaatggc

SEQ ID NO: 35540 - DNA, 260 bp, Unknown
  Description of Unknown: RightRegion for integrase B9541 sequence
accgaaatcgtcacttcacctatgttggaggacgaaaactttatgattgaaaaggagtaaactactatgtctattttggaaaaattcactgtcatcgacctcattaagacccgttccgcatccgttgccaccatcaccggcaatgttctgaagttcaacaaccagaccgctgctgaactgcactacgccccgtacatccaggtgctgatcaacccgaaggataagcagttcgccatccgtggctgcaaggaggatgctcc

SEQ ID NO: 35541 - DNA, 260 bp, Unknown
  Description of Unknown: RightRegion for integrase B9542 sequence
gtactaattgatcatgttgatatttatgaagatactacttttaagataatatatagtaactaatcctttatattctcctttagctatgcgaaaatgtagtatagaaagggagaattttatttatgcaaacactacaaaagccttatgatgaatgggaaagttaccatgatattgagaagtatggaagactaatcctatcaaacattgaatttaccactactaatttgtgcaacatgagatgcgcccattgtgctgttggt

SEQ ID NO: 35542 - DNA, 260 bp, Unknown
  Description of Unknown: RightRegion for integrase B9543 sequence
atacaggtgtataacgaaagaaaaaaatataaagtattctataatgacagtaacactaactaatgagatattattacaattaaaagaaaaaataatcgacaagattgaaatttatgaagatgctacatttaaaataatatacaacacataacactttatattctcctttacctatgcgaaaattaatgtatagaaagggagatttttttatgcaaacattaataaagccttacgatgaatgggaaagttaccacgatatt

SEQ ID NO: 35543 - DNA, 260 bp, Unknown
  Description of Unknown: RightRegion for integrase B9544 sequence
tcatacacaatcacatttcatttcatctgcgggttgattctcacagaggaagttggagcgtaggggcggctgtggacaacagcggcaggatgccagggtgacatcttccacagcgcagaagcagaaacgtggaacggcagacacaggtaacaggagagcacagagttgagcagacggtacggctacaggattagaaacgggaaagcgttcatagagtcatcagaggcggcgaacatcgtcagtttcttcaccctgtatgc

SEQ ID NO: 35544 - DNA, 260 bp, Unknown
  Description of Unknown: RightRegion for integrase B9545 sequence
ccgccggaacataaggatatcattgaggtgccgccgagcgataccggagaggaggtgccgtgatgtcaagagatcctgccagaagcagaccgctttcggcaaacgtgaagcgtatgatgtggcttgaaagagctgcaccgcgcaatacgaaggtcctgaatgctgaaagaatctggacagagaatgattatatctactgtcataagcaggggcagttgtttatggaagcggctgctatgggcttttcgatggaatccttt

SEQ ID NO: 35545 - DNA, 260 bp, Unknown
  Description of Unknown: RightRegion for integrase B9546 sequence
aactacaaatttagattaaatatgggtgttggtaaattagaaattgtaacaccattcatttaattaaatcataattacactaaagcttgtgtaatcaaaattaaacaactatgtttgcatcgtcttaacaacaactggaaaaaattaaatatattattaacatataacaattaacattatggcagcacctagcgatttttacaattattttcaagcaatcaaagaaaatcaaaaattagttgatgaattgaatttaacag

SEQ ID NO: 35546 - DNA, 260 bp, Unknown
  Description of Unknown: RightRegion for integrase B9547 sequence
cggcttcacctgcggatcgatcgggaatccgcacagcttcgaacagtcctgactgccgcgtgacatcaagggcacgctatgattcgaacgtatcttcgatccttctacctgagtgcttccggccaaaccgctgtgatcgcgtcatgacggttagttgacacttgacacccgatcctgcgggtatctatggtcttggtaggcaatcacgttcgcggcgctagaagggtcgagattaaatgccacgaccgaggacactgcct

SEQ ID NO: 35547 - DNA, 260 bp, Unknown
  Description of Unknown: RightRegion for integrase B9548 sequence
cggtgtccgatctgcggcgaacagttgatcgcttgcgaacacgggccaaacgggaaagattgataggaaggggctttcgccccttctttttaacagttaccgtttacaaccggtcttacaatctggtattcgatgaaggtcttcgccatgatttcggctaactctttatcaataccctgtttgattaagtcttccttgtatgctttctttgctcttttctctgctactgtcatttttttatttccgcctttccttaactt

SEQ ID NO: 35548 - DNA, 260 bp, Unknown
  Description of Unknown: RightRegion for integrase B9549 sequence
attggaattgattatccattaaataatatagaaaaaataataagttttacagagttattttaatttattttttatatctaaatcggggttgtaaatgccccgattttttatttcttcttttgtaatttttttacaatattcgtctatttcacttggtagcatttctttaatttgcttttttgtaagccccatagaatgaattaaataatattctgtagattcgtcaacaatcatattaactcctaatgaaattattatag

SEQ ID NO: 35549 - DNA, 260 bp, Unknown
  Description of Unknown: RightRegion for integrase B9550 sequence
gatgcttggactcctgaaatgaaagaaaaacaatcaaaacttattttagaaaggaatttataatttatgaatcaaactattaacaacacaactaatgaaaacaaaatcacaaaggtagcggcatatttctgctattatgctgaccctacaaacccatcaaaacagtatgatgagcagtacgaatactacaaggaaaaaatcacaagtaaccctgactacgaatttacgggcatatatgctgatgaaacttcaactaatac

SEQ ID NO: 35550 - DNA, 260 bp, Unknown
  Description of Unknown: RightRegion for integrase B9551 sequence
actgtgtgcggatcagatgtcggagagggaacagaggagaacagagatcgagcagacctttgattatgatggctatcaggtcgcccggagggaactttttgcacatcttcgagatcccgccattataataaggaaagacagcatcacattcaacacggcctgcattgcaggtttggaggatgtggtgtacgtcaacatcatgtttaacagcgacttaaagcggcttgtagttaaaggctgtaatgaaaatgacagggatg

SEQ ID NO: 35551 - DNA, 260 bp, Unknown
  Description of Unknown: RightRegion for integrase B9552 sequence
tatatgaagacggagaaaggcaacaatgacagcattgtgcttgatgtgtgttggcttgtttaattgctcgaatgtgcgtgaattcgttgtcatcatcgatgcgcacattcatcgagcattcgaggagtacaacgatttgacatacaaaaagaaaagcggagaaaatctctccgcttgtttctgtttacatgagtcctgctttgctctttgtgattgttcctctgatgttgctgattcctgcgacaacaatcaacggaagt

SEQ ID NO: 35552 - DNA, 260 bp, Unknown
  Description of Unknown: RightRegion for integrase B9553 sequence
atggagcagcctgaacgaccggtcgttcacccatcggagcagaagtggaaatacgggtcctgagaaccctcaggaaaaccgagacaggtaagcgcagcgttggatagctgcgcttatctgtctgggcttgtgcgaggctctatgggcgtctctggcactgtctttggacccacgcggccagcttgtcattggccggtcgaatatgcgttgttcgccgctgtttcaagaaacgcatcaaacgcgggttagcttggctgatc

SEQ ID NO: 35553 - DNA, 260 bp, Unknown
  Description of Unknown: RightRegion for integrase B9554 sequence
ttagaggagaaggaagaacctgcggaaacaactgaagaacccaacgataaggtagcggtttaagactcacccctgcactgaaggcttcagggcctccggtgtgggggatttttttgtgtctccagtcattcgttcattgaattttcagatatcttaagtggctattcggagggtggtgtggtatactaaagtagaagtagtatatattgatttaaggggagtataatgagcgaattagataagactcagtggcacccggc

SEQ ID NO: 35554 - DNA, 260 bp, Unknown
  Description of Unknown: RightRegion for integrase B9555 sequence
attgaaatggctttaaaagtgcctgtaaggcagatatacagagcttatcagcctgaaaattaatatcagtcgtaaagggttaactatggcaccttgggaataaccctttacgactgatattacaaacagtaagtggggctcctataattgatgattttaacatgtttctccctggaactcgtaggcaaatccctttggttaactttaatcaagtttttctaacttgtttaatatccgctcgatcgaacgttcctgagatt

SEQ ID NO: 35555 - DNA, 260 bp, Unknown
  Description of Unknown: RightRegion for integrase B9556 sequence
tgtccatcggaaaaagttgaagcaattatccaggcgcttaggcactttcagatgattgaatgagaaaaaacggcccacgctgtttgcgtgggcctcactttcttaacctattaactttaccggcaaatcaattgctggctttttatatacggcaaatgttaccgacccgtcagcaaccgtggcatagccgctagacaccatgctgtaagccttagcatacgccttactgcttacagatgatgacagatcggcgctaaacg

SEQ ID NO: 35556 - DNA, 260 bp, Unknown
  Description of Unknown: RightRegion for integrase B9557 sequence
tctgatttagttttatataagaaagagcaaacagaagatgaagaggaaagctctgaagattagctaaagcttcgtagcatttcgaagaaaggctacgaagcaggaatttgactttgtcaaaattcctaaccccctatgagttttgacatgctatcaaaactcgggggctctgcgaggcatcgaattagcgacaaattttataaaaagcacctaatatttggaacaaaatagtacctaattttgttccaaataagtacata

SEQ ID NO: 35557 - DNA, 260 bp, Unknown
  Description of Unknown: RightRegion for integrase B9558 sequence
tatgatttgccaattttaccaaaagcaagaaaaagaaatactccttatttaataggggaatgatagggtaggggagtggattaaaataaaaaaaggaataagtggtttaaactcattcctaatgggttgttaaattttactatttttattttgctctttctttaatttttttgcctcacgttttgctcttccttctgctaatcttttttcttcactatctctatattctctaatttttttatcattaaattctttggtta

SEQ ID NO: 35558 - DNA, 260 bp, Unknown
  Description of Unknown: RightRegion for integrase B9559 sequence
ctgctcaagcgtgaggattttgaaatcgtagtgaatgaagatttgattgattggatagattaactcagtggttttagaagctatcattatagatttgatcactctcaactataaaattattaaagaattataaatcgagagtgatcaaaacaaccaaaaccctctcgtttgagcatgattttgatgtctccgaataaatatctatagataaattatgaggagcattaaatgaactttctaatagaagtactcgcagccat

SEQ ID NO: 35559 - DNA, 260 bp, Unknown
  Description of Unknown: RightRegion for integrase B9560 sequence
gctgacagcagaataacattccgcttcaaagacggaacggaaattgaggttggggctgaataagccccgcctttttttcttttaggacaattgcgtatccttccttctgttgtcggcatagcaggctcgaccgcagaatttacgctttggatttgcagtttcaaaggaacgcccgcactgtacacaggtgattgtatagagcgtcctgtccatctgctcttggtgctgcgcccaccacttcatgcggcaggcatcggagc

SEQ ID NO: 35560 - DNA, 260 bp, Unknown
  Description of Unknown: RightRegion for integrase B9561 sequence
gtgcattccaaggatgcaatcgacattcactttttggacggaacaatcgtcaaagtcagataaatacagcattttttaagattgcaaaagtaaggttgcaattggggagtgtaccccttttgcaaccttactttaatgtaacaaaaataatatttccttcttttttacgcacggagagttttttctttttgcactctgtgggagcgtaaagtattaagggcatcttctcttgccctgtcatcagcctctctggctgccat

SEQ ID NO: 35561 - DNA, 260 bp, Unknown
  Description of Unknown: RightRegion for integrase B9562 sequence
tgtaaaatagatggctacaaggctgaggtggctacactatccaaatcatttgacaatcggtaaatggtatatgtatcagtaaagcccattgttgtgttctgcgttgattttgatgaaacgcctgttaatgcgggtttccgctatcgtgtttatgtatcatacgttatctaatgtatgttacatataccatttaccaattgtcaaacaccaaccacccaataataaatttagggtatacccttttttctatattccttggt

SEQ ID NO: 35562 - DNA, 260 bp, Unknown
  Description of Unknown: RightRegion for integrase B9563 sequence
gagctgcgccaatatctggaggctttcaatattatcaagaaggaggacgcagccaatgagtgaaaaagcgaatcagcaggtgctgtctaatcttctccgcgccatggacacgtctgctccgagggaaccgggcaatgtgccgggcaccagtaatcgagagcctcacgaggagatcattgaattgggtgatggctttgactttgagggttttcaggtggttcgaagggaattcttcgcccacacctttgaacccgctgtca

SEQ ID NO: 35563 - DNA, 260 bp, Unknown; identical to SEQ ID NO: 35553
  Description of Unknown: RightRegion for integrase B9564 sequence

SEQ ID NO: 35564 - DNA, 260 bp, Unknown
  Description of Unknown: RightRegion for integrase B9565 sequence
gttggtggaagatggaacaaagaagcaaccgttagtttagaggttgaaacctatgatttttaatgttctaattgtaggggcaatcatatatactttgttatgcccctattcttctgtacctttattatatcagtgataacaaccataaggagaacattgatttataggcattttaaaagaccaaggatttttgcttggtcttttttttaaaaaaagaatgtctttactagcacattctctttatcaaaacacatttattc

SEQ ID NO: 35565 - DNA, 260 bp, Unknown
  Description of Unknown: RightRegion for integrase B9566 sequence
atttctttgaaattgcccttattcagccgtgtaacgaatagcagtttccgtgtaactaattaatcattttctttgttatcgcacttacatataacctgctgttatctgctttgtgatccctatgatgccccagaaggggcgttcaaattccttctagtggagttcaattatatcaatgggtgcgtctttagccacgaaaggaacctcttttgtctaccaagacaagagaggtttctctttacagaaaaataaccccatgg

SEQ ID NO: 35566 - DNA, 260 bp, Unknown
  Description of Unknown: RightRegion for integrase B9567 sequence
gaaacaattattgatgatatgaaacaggaggtcagtgatgaacgatcaaactctgatgaatgaaatggaaatacttgaagtagatgattttaactttgacggctatcaggtagtacgcggagagttctttgcccacatatatgaaccgtcaattacatttaacaattacaaagtaggcgttaatacagcctgcataaagaaactaccagaatatgactatgtgcagattctggtaaatccggaagataaaaaacttgctg

SEQ ID NO: 35567 - DNA, 260 bp, Unknown
  Description of Unknown: RightRegion for integrase B9568 sequence
cagcttggtatttcctccatgcttgcagaaatggataatagaggagtggatagcaatgaatgagaattaccagtttgatcctaatggcgcatttcgagcacagcgagaagtgcccaatgatgttgttgtgtcagaacctgaaaatgatgtggtttctgatgatgcattttcttacgatggttatcaggtggtccgtggcgagttttttgcccacacttttgaaccctcgatcaccttcaacaattgcaaggtatctgtaa

SEQ ID NO: 35568 - DNA, 260 bp, Unknown
  Description of Unknown: RightRegion for integrase B9569 sequence
cgattcatagctgagcaattagcccccataaagcagaaggaagaggtggattttaatgcctgaaaaaaacgatatcccaacctttcggaatcttgatggagtgtactaccgtgtgattcgtgatggtatacatgtcaaccgatgcttttctgatttgtccgaagccgagcaggatgagatcatggcagagtataacgcggaacaactcagacggctttgtcgctttctcagcatgagcctacgccagattggaaatgcgc

SEQ ID NO: 35569 - DNA, 260 bp, Unknown
  Description of Unknown: RightRegion for integrase B9570 sequence
gatgaagaacaaaaggaaagtattaaactagacatctatttaaacaatagatttaaactataattaaattctgtgttgggtgggtgtaacttcataacacctattcaacactataccaaagttataactttataacataggaatagataaggaggaacatatgcaaaataagtgtattaatcttagatggagaaagaaacaaggcaagacctattgttattgtaccaaaaaacgagccataatagaactttcaagttgtt

SEQ ID NO: 35570 - DNA, 260 bp, Unknown
  Description of Unknown: RightRegion for integrase B9571 sequence
ggctttgacgtacttaaaaaatacatacacgccgaattaagcggtgtttcattacaggagtaaaacgaaatggatgagatgaatgaaaaaaaagatgttttagcaggattattagaaaaggtgcaggacgattcccctgccgatctgcctaccccgtcttcggacgagcaaacgcctaaattaaaggaaacggatgaattacttgatatgagtgaagactttgacttcgacgacttccaggtcgtaagacgtgaattctt

SEQ ID NO: 35571 - DNA, 260 bp, Unknown
  Description of Unknown: RightRegion for integrase B9572 sequence
tgggaattaaacggccacgtcttcgttacggctggttcttctggcgagcgttgtcaatcgtaatagaaatcttcgtcatattgtccagcatcgccttcttaacggcatcattgatggagaggcgcccaataaagtccttctgctggctaatcgtgcgcctcatgaacgcaaaagcctccggtttgaaacctagagttatccgcccccctgagtccgacattttaaaataagttaatcaggccgatcttctttttcacatc

SEQ ID NO: 35572 - DNA, 260 bp, Unknown
  Description of Unknown: RightRegion for integrase B9573 sequence
cagcggacagcctacctgatgagcgacatcgaaacgctcgcagcggaacgagggacggcgtgacgcggattggccgtttatgtaatggacgggattacccccaagccctagaatgaggactcgactcgtgaccccccagatccacaaactgagacgccgccaccgatccgtgaacggcgggaggaaactgggctacgtccttttccccaccggcttgcccgacgtgcgctggatgggaccgtacgacagcagccccgaag

SEQ ID NO: 35573 - DNA, 62 bp, Unknown
  Description of Unknown: RightRegion for integrase B9574 sequence
aaagccatcacggcctgtaatacccgacggcatccgcggccgttatcccggcggagcgcatg

SEQ ID NO: 35574 - DNA, 260 bp, Unknown
  Description of Unknown: RightRegion for integrase B9575 sequence
aataagcgtccacaagatagaatacacaagtggtatgatattttgattgagatttatttctaagaatatagagtgtcatctaatatggtggcactctattgttttgcgcaaaaaaataagggcaacagatttctccattgccctcaaacatcaaccgttgtttatctgatttctaatcagacaaagactcttgattaagttgtttaaaatttcttcgtcaagcgtaccagtcaatgaaacgctatccgtttccttatctg

SEQ ID NO: 35575 - DNA, 260 bp, Unknown
  Description of Unknown: RightRegion for integrase B9576 sequence
gaagatgaaactgagtttagagaatatatgagtactaaatttggtactgagtttgaagattaaaactgaaaaggctactagaataatattgtagccttttttatttaaaaaaatcattaactttgagccttaataactaatcaatcaaatattatggacataaaatttaaagacaatccaattacaattaaaactattgaagttgatggcaagaaattaacaaagcagttgttgcaacagattgaaatagatgatttgca

SEQ ID NO: 35576 - DNA, 260 bp, Unknown
  Description of Unknown: RightRegion for integrase B9577 sequence
ctgaagtccaagctcgtcagggaggggtgggagcgtgacaggaacgacggcctgatacaatagcctcgaaaaaaaatatttcacaagcaggacgtacaaggagatacgtcattcatggcaatcaacgatcaaatctttcgattatacgcggagtataatagaagcgtgggcctgatcagcctatgcaattcaagcgaacgtggtgggcgattattcccttaaatcggttttttcccgtccttccagccatggttcgcatt

SEQ ID NO: 35577 - DNA, 260 bp, Unknown
  Description of Unknown: RightRegion for integrase B9578 sequence
gaagctatagataaattcacacttacacctcatttaaagatactaattgatgaaactgaataaataagcaaaaaaagaaacccttgatattaaagggtttttttgatgggttttttcaatgataattaaaaggtacgtactcttacgtatatttattatataaatgataagtacaacgatttaatcatcaatattcaagtaatatcttttaatatcacttttgctaaagcgtttcattaattcttttaaatcatttcttt

SEQ ID NO: 35578 - DNA, 260 bp, Unknown
  Description of Unknown: RightRegion for integrase B9579 sequence
ggtaaatacttacgtaagaatcaatggtctgacgcaattattgatgtcgcagtagaactataaagagttctattaatgtccaaacgatatataatacctcatggtgtgagaaatcataccgtggggtattattttatctacaattcataaacgtaaaaaatagggtaaccagaaattaatctgattaccctataactatttattcttctaatttatcgtggtcaaacccaacactcattaattttttatatttatcattt

SEQ ID NO: 35579 - DNA, 260 bp, Unknown
  Description of Unknown: RightRegion for integrase B9580 sequence
tggataaaagatggcattacatcttctataacattgctctctagtgatccaaatctagattgatcttcttgaattagatattcaagccaaagagataaagagttttgaaaactcagcatttggagattgcttatttctgataaatttaatgttacttcgtttaatacattattatcattattcattatgagttcctattattattttatttattataatgtgaaagatctaaaagatctaaaggattgtttctttctaat

SEQ ID NO: 35580 - DNA, 260 bp, Unknown
  Description of Unknown: RightRegion for integrase B9581 sequence
aaacgagaacttagatacaggcaaaaatactgtttaaaatatctgattacagttgcattataacacaagacaccaataaccgtaaaaaaataggagcgaacacctctttatcgagatgtttactcctatttttttacggtcaatttgtttacggttagtttgtaaactttttaactaacatattataagttctgttgtctatcaagccttgtttaagcaacatttttgagagcgcaatcatatgagcttctttaataatt

SEQ ID NO: 35581 - DNA, 260 bp, Unknown
  Description of Unknown: RightRegion for integrase B9582 sequence
tcattttctacaaaacataggatatataattgggaagacctaaatataactgtgtatttgtaataacggtagggcggattgaagtgattcatttcgccctgcttttttgtttctaaatatatgcgcaaaaaaatgggactgcaaggtacaaaaaccctgtagtcccataattattatgtcttataaatcctcaaaactgaacatctactttgtgacaaaactcatgtttcatcatttttatcgtctttgtcgctgcttct

SEQ ID NO: 35582 - DNA, 260 bp, Unknown
  Description of Unknown: RightRegion for integrase B9583 sequence
ttgagtgggatagtaaacggtttatccagctttgatatgataagcaaacgaatagtattttaagagaagaagccccgctaaaaggggggcttacttcactattgcttatacttttctccttttagcgtatcttccttcaatgagattctcccgctcaagaagcgcaatcttgacgcttgcgacgcaggctccacggggactatgacattcggcaaagtctctaatagatttcatagcttcgcatgagagttcaagcggtt

SEQ ID NO: 35583 - DNA, 260 bp, Unknown
  Description of Unknown: RightRegion for integrase B9584 sequence
atgcgtgaagcagttagtgttagagaaaaagaaaggtggtcaaaagtattatggcaaaggtaacaattatcccatcaacaatcgatcctagaacacatttaccaacaatgagtactaaaaagcgaaaggttgctgcttatgctcgtgtttcaacggatagcgatgagcaattcacatcatatgaagctcaagttgattattatacaaaattcattaaagcaaatcctcaatgggagtttgtagaggtatataccgatgaa

SEQ ID NO: 35584 - DNA, 260 bp, Unknown
  Description of Unknown: RightRegion for integrase B9585 sequence
gagaagttgaaagaaagtctggagaatttaaaaacgaaagctggttcacttgatggaacataacgaatcggattatctattcaataatagtattcctatagaggaatcaacatcagcggaaactgaagttgttgacttagccggttatcaggttacgaaagctgagctgtttgcgcacactagagagccctcaattaccatatgggaaacaaggatgaagtttaacatggcatgtctcagacgctttccaggagtacaat

SEQ ID NO: 35585 - DNA, 260 bp, Unknown
  Description of Unknown: RightRegion for integrase B9586 sequence
gcatattcaacacggcacagaatacacaaatggaatgacatacacatttcagtattcatttaataacctactaagggctatgaggcttcggtcttgtagcccttatttttttaccatttcggcagtaaacaccacttattgccgatatgctactaatggagacatatacacacctaagcgcaaaaaaaaaatagcgggtctatcaaatcaatgatagcccgctaaatatgtttatttgctgaatccgcgcacatcttcaa

SEQ ID NO: 35586 - DNA, 260 bp, Unknown
  Description of Unknown: RightRegion for integrase B9587 sequence
gacttgacaatatcaccgttccggaaagacgtgatttcgttgggcatttcaaaagtagcatagaggacgcgcccctgcccgccctcagaccccccaccaaatcgccccagcggcccgcccatgcgttggcacggccagcccttgcccggcctattggctcttgggcttgcgcttgctcttgcccctgggttggcgtggccgatcccaataggggttcttgcatttggggcagaccgccggcgggtcattgatattgcgcg

SEQ ID NO: 35587 - DNA, 260 bp, Unknown
  Description of Unknown: RightRegion for integrase B9588 sequence
tttaatgaaatgatggaaatatgtgaaactaatggatgggaaatagattacacctataagtaatcccactacggctttcatatcttatctttaatccagtcttaacggactggattttttgttatcatcttatctaggattccatcttgataacagaaatatacattgaatgaataaaacatatcgttaaagtttgcttctttttcgattatctataaaaaactttgtatctttgcatccgaatttcaccgtctatagta

SEQ ID NO: 35588 - DNA, 260 bp, Unknown
  Description of Unknown: RightRegion for integrase B9589 sequence
cagataaggagggagcggcattggaacagcaaaggaaagtccaaacaatcccagcaaccctgacgcggttttcggccactccgatctccgcgcagaagaaacgaagggtcgccggatacgctcgcgtctccactgatcacgacgatcagttcacgagctatgaagctcagattgattactacaccaattacatcaagggccgggacgattgggagtttgtgtccgtgtacaccgacgagggcatcacgggcaccagcacc

SEQ ID NO: 35589 - DNA, 260 bp, Unknown
  Description of Unknown: RightRegion for integrase B9590 sequence
tatgcacctttaccgacaattgtcctcccatttgatgcctcagatgtggcctgcgcagcatgatcaccggcacaaaacagccgttttcgccgaggattggtgggcacaatacgattcatgagcactatccagaacacccctcatacgtgttatcggcaaaagaggtgagaaatgtcaataccagatgaccatgtaaatcggttcgagcaggggatgcagtatatggcccaatcctttcactctgcggtggagaagtttgg

SEQ ID NO: 35590 - DNA, 260 bp, Unknown
  Description of Unknown: RightRegion for integrase B9591 sequence
aaagccgaccgcatcgatatggctttgaaggccagcaagcgtattcgtgaagcactggcttaaatcgccagtgcagtagcccacaaatcgtcaacggcttccgctgacagcccaagcgctcccgcaatcacaagcaaagccggagcaaggcgagtaaacgaggtagcatattcccactcgatttccgcttcgtctcgtgccggtcccgctggcagcgcatcgattgccgaatacaccgccgcaagcgaagtacccgaacg

SEQ ID NO: 35591 - DNA, 260 bp, Unknown
  Description of Unknown: RightRegion for integrase B9592 sequence
gcttccggctacttttcactggttgagcaccaattttcggcccgtttgtggcgcaccgcataatctgtaattattttgtaatctttgcgcaaacaaaaaatgccccgccagcaatccgtcaggatgccagcggggcattgctttacttagtggagataccttgccaattcagatgcaacaaagcctgcgatcaatgccgcaatgaccgcccaccagagtttgtttccaaatactccgggggctttttccagcgcggtcaa

SEQ ID NO: 35592 - DNA, 260 bp, Unknown
  Description of Unknown: RightRegion for integrase B9593 sequence
gcctttttcacacaggccgtcagcggctgcatttcaggtgtagttgtgttagatgtccgttagaaatatgcagtgctgccgttgctgtgccagctcacagcaggcttccctgtctgaacgcagcgtttcccgaaagccgggaaatgctgcgttttctcttgcccgcattgggctgaaagggaagccgccatgtcaacattccgcgtcaataaaaatgtcaactacaccgtcatgagcaaccaccacctgcaggataagag

SEQ ID NO: 35593 - DNA, 152 bp, Unknown
  Description of Unknown: RightRegion for integrase B9594 sequence
gatataatgcgaatgtccggtggacattcgctcgatcccggctcgacgggatcgacaccttgactatctggacgcctccatcgaggagctcgaacggacggtccaggcgatccccggcgacggacgggtatcctgggatgtgctggaccggc

SEQ ID NO: 35594 - DNA, 260 bp, Unknown
  Description of Unknown: RightRegion for integrase B9595 sequence
aatctcaaaccaacagatagaatccacagatggtatgatattgtgatcgagattattttttaagctatttaattgcctacagttaaagggcgaaaaaagccgcttctgagagtttatctcaaaagcggcttttatttaattacacttttcgaatataattcttgtgagcatatgcgatatgaaaatcagttccattttcaattcgaattctatcccaatctccgacagttccaattactctgacatagttaccattccca

SEQ ID NO: 35595 - DNA, 62 bp, Unknown
  Description of Unknown: RightRegion for integrase B9596 sequence
cagcggcgcaaacaacaggaaagacccaaggacaccgaggaaaatgagacaagtccgttatg

SEQ ID NO: 35596 - DNA, 260 bp, Unknown
  Description of Unknown: RightRegion for integrase B9597 sequence
aagctaacaaaccaagtgataataggtaaaagaaaaatgaagataagagtatacattgtgtgatttttaggtagctactggttagaggtttaatcagtagctaccttttgttttatccccattcttgtcaataaaatgataagtagtagttattttttatatattaaataagtagtgtaaaactgtataaaaaataatgtatatcatacagactcaccttgtgtaatttgggggtggtctaattaaacagattggaggat

SEQ ID NO: 35597 - DNA, 255 bp, Unknown
  Description of Unknown: RightRegion for integrase B9598 sequence
tatcatgctgagtatacaaaggcaaatcgttttaaagatattgtttgcaaaatctatatatagttcgagagggaagcatttgcttccctttcttttatctctcgattaggactaaatccctgaaataaaaaaggatttagtcctttttttatataaaaatattttaaaggagattgattatgaaagtatatgtagtagcaaatttaaaaggtggcgttggaaaaaccaccacaacagtaaacgtagcttatacat

SEQ ID NO: 35598 - DNA, 260 bp, Unknown
  Description of Unknown: RightRegion for integrase B9599 sequence
gcggaagcggccggcttggtgcggaaggtcggaaagaacggcggttgggtttctgcaaagtagatgcaaaatgcgcatcgcctagttgtcgctaagctttttgaacatctcgacgcccgtcattggcacttggtcaagcagcacgtaagacttttcattgaagttcaggaagtgccgaatgtcgtcggcactttccgtccctccgaatacatgctgatcctgctgatcgctagggattttttctgcgaagaatctggaag

SEQ ID NO: 35599 - DNA, 260 bp, Unknown
  Description of Unknown: RightRegion for integrase B9600 sequence
ttgtcgtaccagcgcccgcggctggtttccctcggtgcgtggcgcgaacggagggcggcgtgatgcgacagaaaaccggcacttcagtgaaccctgggttgccaatatcgcaacagcaaaggggacggattattgccttcggcagatggaaggctgcggcgtgattgcaatgcaagaagtgcctgtgccgcagcacataatcacattttgttacattgagcggattgaggaaaatgaaagaaattgctgcgaaatggatg

SEQ ID NO: 35600 - DNA, 260 bp, Unknown
  Description of Unknown: RightRegion for integrase B9601 sequence
accggccattatgtgaacggcaaactatcaagcattgaatatggggctagtattagaacttagagcgcaaaaatacggggctgcgattgcagccctttacttatgccgccagtatatcggcaatatcattcttagacaacgcgcgaataatcttcattttctgagcgattacccaattcacctggtctggagcatagtatactatttcgtaatcagatacttcacactcaacccaaacacgacgttcgccgcgccgcaga

SEQ ID NO: 35601 - DNA, 260 bp, Unknown
  Description of Unknown: RightRegion for integrase B9602 sequence
ggcgccgtgttcttcgcaggcgatgaggacggcctgggggcgggggtggagtggcgggcgtgatatggcgcacatccgcaccttttgccgatgtccctaaacatgcttaagccttaaggtctgaggatacccaagggagaggcctccccttctcatgccactgtcccgctttcgcagcgacgcaatttcagccgagcttgaggccgccgccgttcgattcggccagcacctgcgccgctggcgcatcgctcagggctggt

SEQ ID NO: 35602 - DNA, 260 bp, Unknown
  Description of Unknown: RightRegion for integrase B9603 sequence
accgggcgcccgctcaaattccgacacgccgaggttatggaggctgcacggctgcacggctaacgaccagccgcacccagcccccaggtatgccccaggtatgccccagcgggctgggaccgattggccgttttcctaatggacggaatcacatccgtgacctagaatgaggactcgactcgtgactgaactcgtgaccccccagatccacaaactgagacgccgccaccgatccgtgaacggcgggaggaaactgggct

SEQ ID NO: 35603 - DNA, 260 bp, Unknown
  Description of Unknown: RightRegion for integrase B9604 sequence
ctcggagcaaaggaatataagttcagattccttgatgggaccgtgaaaaaaatgaaagtctgaagtctgaagtctgcaattcgggacaccctcgtgcagacttctttttgtttccccaaaacacaagaaatcccttaaaatggcggtttttccattaaagggacttctgtaactctgaagctatctatgtgatttcagcctttgcattatgcttccttcttagccagcttatcgtcactactctttttatatatgtcctg

SEQ ID NO: 35604 - DNA, 260 bp, Unknown
  Description of Unknown: RightRegion for integrase B9605 sequence
aataaacgaccacaagacaggattcataggtggcagaatctatcggtacagatttatatttaaaaaaggaaagggtataagattcttatttcttatacccttccaattattcacaacgaatactgaacattgctgttcctgtatactgtccggcttgtttccctgttgtatctgatacatatgttgagaatgatttactaataccattatctccataaccaaatgaaacaagattcatatttgtaggctctaaattattt

SEQ ID NO: 35605 - DNA, 260 bp, Unknown
  Description of Unknown: RightRegion for integrase B9606 sequence
ttgtgttttttcatagccataacggatttcgttataatctaccaaaatccagcgagattctaaaatcgttgttagaatctaccgtaaaggagcatggctatgattaggattttactgtccacccggcttggcgagcggaggtggtcacaagctgaccttgcaagggcaacaggcattcgaccttcgacgatcaatgacctgtaccatgagatcgcagaaagggtaaacctggagcatctggatcttatttgtgaggcgct

SEQ ID NO: 35606 - DNA, 260 bp, Unknown
  Description of Unknown: RightRegion for integrase B9607 sequence
gagttactttcacatgtagggtatccagaactagatagtaagatgttttggcctcggaagtagtgggctttagctagcctcgtagcaattctgcggggcttttagcaggtgttaattgtgggtaaaaatatcagcggtaatctaagaatgtgaataagagtatttattatataaaaataggtaaatcaatgctttaggaagggcagcagaatgttttactaaaaaaaaggagaaaagaggcaaagataaatcgattggtt

SEQ ID NO: 35607 - DNA, 260 bp, Unknown
  Description of Unknown: RightRegion for integrase B9608 sequence
gcttcttttggcaacatgggcgggcgtccacgcaaaaaacccgtagggattagtgatggttagggaaacttcccatgacatgtgtaatcctcatgggtttttgcgatctgatcaagtataaagctcaactattgagtgcggcagcatgaactcttcaatatcgggcagcggctctccatagaagcgccgtctggctcgcgacaccttggcatgatatgcccggagatcaggtataaatccgatttcgtcagcgaggtgcg

SEQ ID NO: 35608 - DNA, 245 bp, Unknown
  Description of Unknown: RightRegion for integrase B9609 sequence
gctatgagccagagaatgaaacagataaggagtgagaagcattggtcgtccaaaagaaagtaaccaccataccggcatcgctgacccgctttacggcgacgccgatcacagaattaaagaagcgccgtgtggctggatacgcccgtgtttccactgaccacgatgaccagttcaccagctacgctgcacagattgattattacaccagctacatcaagagccgagacgattgggagtttgtcgag

SEQ ID NO: 35609 - DNA, 260 bp, Unknown
  Description of Unknown: RightRegion for integrase B9610 sequence
cggacagcggcacagcggcgctggcgtgagcggaaacagacaggcgctattgctgaggaatgataggcgcgatgtccttgagattcacgttaagggtgaccgcctcaccagccaaaggaatcgcagccgcgtctgacgctccctgtgcagccgacaattggttgcgtacctcggcagcatcggccacgtcagttggatcgttgagtaccttcatggccgcgccccacgcgtgtccttcatcatcagcccacgctgacaac

SEQ ID NO: 35610 - DNA, 260 bp, Unknown
  Description of Unknown: RightRegion for integrase B9611 sequence
cagggtcgacgtaccgatctcgaaaccttgtcgagcgaggaggcgtccggcatactggcctgagcagtgtgtttgggtgccaactctacgctctgcgcccctggcctgtgaaggtcaggggttttttttgccctgacaaaactgcgttttgttacgagtcctatactcggacttggcccccagacatgaagaagccacgccgagtcgctctggcgtggcttcttgcgaggggccagatcacagcgtggaaagggtctagc

SEQ ID NO: 35611 - DNA, 260 bp, Unknown
  Description of Unknown: RightRegion for integrase B9612 sequence
gcatttttgacgttcgttgtcttccaatttaacttcgtccattatcatttcctttcaaaatgaattgttgctgcataatatgatcggcgacgccttgattttgaatgcaccggaagcgcggatttattttcatttcggccagcacttctttaacaacgccgacaaattcttccaattcgacgccacgttcaacattgaatgttaaagagcaacgccggcgcggtaaatatccgccccatgcgccgttcactttcataacg

SEQ ID NO: 35612 - DNA, 260 bp, Unknown
  Description of Unknown: RightRegion for integrase B9613 sequence
gaacgtgaatctgctaagatgttcgctgtattaagtaatgtaaagttgttctccatagactaaaaagcatcagacacaacattgtatttaagagaactaaaggagtgtgtctgatgctaaatatgaaaagctcttcaattcaggaaacaaacaacatttaaacggcaagagaacctaatggcagaaggagtctctacttaaaaaactgaattgaagagcgaaagagcaatgagctgctaaggacttgaaagagcaaacct

SEQ ID NO: 35613 - DNA, 75 bp, Unknown
  Description of Unknown: RightRegion for integrase B9614 sequence
gggggcggagccgacggggtactcggagaggagcgcgccgttcgcggcgatgtcggccgctaggttgcggtgctc

SEQ ID NO: 35614 - DNA, 260 bp, Unknown
  Description of Unknown: RightRegion for integrase B9615 sequence
tcttcatatacacatattaatgtttacaatgtcgatttttgcaccaccctcccccacaaataacctcactgtttccgcagaaacattacttacccctccatgccgttaccttgttaccgctatgcgttctcctttcaacgcgttccagggtccctgcttgctccatctcaattaatttctttcgcgccgtttgtggagaaacccccagcctttttgccagagcaacagctgtcaattcctttctctcatccaggtacggt

SEQ ID NO: 35615 - DNA, 260 bp, Unknown
  Description of Unknown: RightRegion for integrase B9616 sequence
gacttccgagatgacgaggcacacgttgagacaatagtgttgctacaaagagaaaccttgtagaaatccttagatttaggcacttttcccgccatgtggtgtttgacgcagagggtgataaattccgcaataagcgtattgaggactatatcacggtttcggtagttattgatatggagtgtgggaacacaaaaaactaaatagttgactgaaaaggacatcgtgcaagcggtgtccttttcttttaggcgaaaccgcag

SEQ ID NO: 35616 - DNA, 260 bp, Unknown
  Description of Unknown: RightRegion for integrase B9617 sequence
aggcctacccatggagactccagcgaagacaagcgcttgcagtggttccggcggcttagctgaccgcgttgtccggcttcgtccgggatcgtcaggccgcgtgtggccacgtcgggcagccaccgggcagcaaggcagcaggccatgatcgacccgaacatccgccgcatcttcgaggagaacgggttcggcttccgctacggctgcctggactgcggcgccgcgcgcgcgacctggtgcgaatgcttcctgagagaggc

SEQ ID NO: 35617 - DNA, 260 bp, Unknown
  Description of Unknown: RightRegion for integrase B9618 sequence
atcaattggtgtgtggaagtggtgcgcatattgctctacggtagacaaaggaccaagggatgaaacctcaaaaagtgacgatcctacacccatgcggtcattcagtcgagcatcgctcatcttgtccaagtgcgtttgcagcaagacagcaggagcgcccttgcttggcatgtcggcggaaacaagaacgagcccaagggaggatagccaggaagcgcatggagcgttcgtctctgtatctatgtttaaggatggtagct

SEQ ID NO: 35618 - DNA, 260 bp, Unknown
  Description of Unknown: RightRegion for integrase B9619 sequence
atgagcgaacacatgaagcaattacggaaggagcgtggagacaaatggcgcagagaaaagtaacggcgattccggcgaccatcaccaaatatactgccgttcctattggcagcaagcggaaacgccgtgtcgccggttatgcccgcgtctccaccgaccacgaagaccaggtcaccagctacgaagcgcaggtggactattacacgaattacatcaaggggcgggacgattgggagtttgttgctatctacacggacgaa

SEQ ID NO: 35619 - DNA, 260 bp, Unknown
  Description of Unknown: RightRegion for integrase B9620 sequence
acggtgtacagcgagaagggcatccgagtgacctttaaggatgggacggagatacaggtttaaaggttgttgacgtctacgctacctgaaggaacaccggcccggcctttacagcaacttgattttgaacgaaaagctgtacccgcacctgttggagattgaccgggcggcgcgtgaacggatggacgccatgttgccccgcatgatggaggcggcaggcgtcaccgaggaactgaaagcctgtgaccccatgcgctggg

SEQ ID NO: 35620 - DNA, 260 bp, Unknown
  Description of Unknown: RightRegion for integrase B9621 sequence
atcaaatttttgtatgatggccagaccccggatacagacaaagaacccgtcacagccctttgactgcggcgggttccttgcttatgtccgggtatcattatatatctctttgcatcctgcgtctatatacatcgcatccccgatgcaaactaatgcaggatgatcggccagaaaaccgatccatccggaggggatattcgtattatatcccgccccggatgggtgtcaatgactcaggcagccggttcctcctgattcct

SEQ ID NO: 35621 - DNA, 260 bp, Unknown
  Description of Unknown: RightRegion for integrase B9622 sequence
tattataatccgggcgccatcaagctggtcggtacgcggcgtaagatcgagcgtcatatttaggacacgcctgtctgcaggcgtgccgtaaatatgacattaacaaaccgggatatgtgtaggggtaaccgctaagcggcttgtgcgaggctgcagcgggaggcgtggaccttgcccgccggcgcatggcattccgggcaggtatcgcccagttcgttgaccacggcgacggctgcggcaggctggcgagcggtgccggt

SEQ ID NO: 35622 - DNA, 260 bp, Unknown
  Description of Unknown: RightRegion for integrase B9623 sequence
gcagagggcggtcactctttaacgactgtgacgaccgaggaaggtgtgaccctgacggaatgaaggtggcgtcggggtgagcattcagcacagcatcgcgaatctggcgcttgcagctacctgaagcgaagccgaagcgtatcttgccgttctcggtaaatgagtacttgagcccaggacggtcgcggaccttttgcgccttggcaaggtaaaactctcgacggagccgagcagctgttgcgttatcgatcatgcacact

SEQ ID NO: 35623 - DNA, 260 bp, Unknown
  Description of Unknown: RightRegion for integrase B9624 sequence
agcaataattgttgtagtgatgaacaacaccttttaccgcatgcccagcgtgtcggtccttgaaacatgggccggcgatgtccccccggatttcaaattcgtgctgaaagcatcgcggcagatcacccacatcaagcggctgaagaacgcagccgattcggtatcctatcttctcgaagcggccggaaccctgaaagagcgcctgggggcgctgctgttccaactgccgccgaatatgaaaaaggatgtgccccggttgc

SEQ ID NO: 35624 - DNA, 260 bp, Unknown
  Description of Unknown: RightRegion for integrase B9625 sequence
ggagccaaattcagtcccgacggttttgccgtcggttgggtttactggaagccccgtcgatgacctcgccggggctttcgcattttcgcccagatttcgcgggcacttgcggctcgcgaccccctcgcggcccatcgtcgacggcgaaacagagatcacgatgaccgcggggacacgctcgcaagggccgaaagtgcgctctcgaaggccccgagagcgggtcgagagccgtgatctctgttttactggacgcgcgtttt

SEQ ID NO: 35625 - DNA, 260 bp, Unknown
  Description of Unknown: RightRegion for integrase B9626 sequence
acggtgtatagcaaggatgacgtctgggtgaccttcaaagacgggaccgtgattcaggcataacttcatattttaacaatgcctctcaaccaggatggatgagaggcatctgttttgttagtcatcttcccattggaaatttgcataaccgcaatgagaacatttaatatatccgtccggattattgccgttctcccaaggagcagtataactaccaccacttagtgattgtccgcagttttcacatttcttgccacttt

SEQ ID NO: 35626 - DNA, 260 bp, Unknown
  Description of Unknown: RightRegion for integrase B9627 sequence
gagctttcctcgtggcattttaatcacgagggcgggatgcttgaggggcagtacattccataaccccctgcccggctctctcagggcctcggacacggcaacgcccctgcattgctgcagaggcgtctggctatctcagtgagcgtccgcgcgcgcttacgggcgcaggcaggtgatagtctctccccctacagtcagtacgaactcgtcgggtagtcggacgtagtgaacacgctcgccgtagaactcgaacacacctt

SEQ ID NO: 35627 - DNA, 260 bp, Unknown
  Description of Unknown: RightRegion for integrase B9628 sequence
ggcgcgcagttcttcatcggagacgcagacgggctgggggccggtgtggagtggccggcgtgaccgtatgcgcaatccgcaagaaagtcgggaattaccccactcgggggttgtcctaagtcttaggttggtgttgaggggatcccgtcggcccccctcctccccatggcaccgctctcccgctacagccccgaaagcgtcacccagcagctggcagccgccgccgcggccttcgggtccggcctccgccgctggcgcat

SEQ ID NO: 35628 - DNA, 260 bp, Unknown
  Description of Unknown: RightRegion for integrase B9629 sequence
aaaacttgcattaagacacaagatatggtatttttcaaatataagtaccttttagcactataagagaaaaaaatgggagtggaatcaatgatacatacagcttatgacgtaatgaaagagtttttaatcacggatgcagaccttgatggtaagtacgaaatcccgaaaatcccaaagacttttatccatcctggaaaagatactgtagactttgcggagagctttagccggaagattaagaaccaccgggaactggatgt

SEQ ID NO: 35629 - DNA, 92 bp, Unknown
  Description of Unknown: RightRegion for integrase B9630 sequence
accgttcacagcaaggacgacatccgggtgaccttcaagaacggcaccgaaatcaaaggataacaccacaaaggcaatgagccactgaacaa

SEQ ID NO: 35630 - DNA, 260 bp, Unknown
  Description of Unknown: RightRegion for integrase B9631 sequence
aaaacttgcattaagacacaagatatggtattttttaaatataagtaccttttagcactataagagaaaaaatgggagtggaatcaatgatacatacagcttatgacgtaatgaaagagtttttaatcacggatgcagacctcgatggcaaatatggaatcccgaaaatttcaaaaacttttatccatccagggaaagatactgtagactttgcggagagcttcagccgaaagattaagaaccatcgggaacttgatgta

SEQ ID NO: 35631 - DNA, 260 bp, Unknown
  Description of Unknown: RightRegion for integrase B9632 sequence
gaagtgaggccagatcggattgaggcggctcttaaactgcgaagggcccagccggaagcctagcccctcgcgattagtgaagcctcaagagccggccagcaattggccggctctttcttcaccgaacgccgtcacaaagcccgtcagcagttccgcgaacagcgggtccgtatggtcgagatactgagcctcggcatagatgcgctgtttgcgcgtggtctgctgcgctagcacctgctcgatggtttcggcttccccgt

SEQ ID NO: 35632 - DNA, 260 bp, Unknown
  Description of Unknown: RightRegion for integrase B9633 sequence
acagtctacagcaaggacgatgtgctttttacctttaagaatgggcaggaaatccgagcgtaaggggaaaaaggatactcctcactaccaattgcggtggtgaggagtatcctttttccataagcatcctcttcagttgaatactacgatgtaatctcttgcgaatcggtcaaaggttgcttcggcttccgagaggacatcatccagttcttcattgattttaccacgcacataggcttctcgtagggcaggtctttcga

SEQ ID NO: 35633 - DNA, 260 bp, Unknown
  Description of Unknown: RightRegion for integrase B9634 sequence
ctgatccgccgtattctcccgcttccgcctgctaggtccttgcggcgaaagaggttggcgtgaagaaccgacctgccttctgggtaagggcccgtgacggaatgaccatagcatcctagattttgaaaacaaacctgttcggctgatgtcaggcctccggggggtgatgcccttcgggggcctcgtttcttgagggggggacgccctgtggagtggaagcggttgaccgccagaacgatcgcccgatgtgactgtggctg

SEQ ID NO: 35634 - DNA, 260 bp, Unknown
  Description of Unknown: RightRegion for integrase B9635 sequence
ctaataacggcgcagaacgccgcttcggctgtggagagagggcgaaaccgagcgcgtgcttagaccatttttactggcgcactagaatcaaatcctggtcgggaaagcaggatttcttaaagtgcgttttgattctcattgttttttgatcatggtcaaccataccagtccacgaaacgtccgagtcgcatgtaccccacgtgcccgacccacttcctgagaagacgttgcctgataagtgaaagctaaaaccatacggt

SEQ ID NO: 35635 - DNA, 260 bp, Unknown
  Description of Unknown: RightRegion for integrase B9636 sequence
cgggtctgggctcactgtacggcttcaacccggccggacgaagccctcgccgccgcgtcctgacgttctgcgtctcatcgaacgacccgcccggcgcatcgacgccggacgggtcgttgttcatctacgcataacgtggcggtatgggcactcttggttcttggcgttggtgtagtacacatgggcttggctctagccggtatgtacttcatgactcggtagatagctcagtgtcctaacgagattccgccgcttcgagc

SEQ ID NO: 35636 - DNA, 260 bp, Unknown
  Description of Unknown: RightRegion for integrase B9637 sequence
gaccggcaggacattgctcagcagattgaggaaatgcagaagcgcaggcttgaagccctgtaaagctcgtggaagccctctcgcagaaaaagcgcctcgcttgcttgcgggcgctttttcttttgtatgggcttctgaggggatcagtgacgcggcaattcgtaaactgacacgccgtgttcgatccgaaaatatgcgggatgcctttccacatacaggcgctgttcgcggaagaccaacccgaagcaatcttcctcata

SEQ ID NO: 35637 - DNA, 260 bp, Unknown
  Description of Unknown: RightRegion for integrase B9638 sequence
cgcgtatatgtcgattacctaccctcgcttcgtgaactcgccggggtcttgacgccagcctgacgagctgccaggacctgttccctggcagcgtcggccaacagcttggccaactcgtccaggagctcctcgcgcgtcggcgtgggtggcactcgcggtttcgactcgggcatgccccaccagtgtgcggtgcctcgccccctgccggcgggtcaaatctggacaaatcggaaagttgtccgctactgcaaatcttcggg

SEQ ID NO: 35638 - DNA, 260 bp, Unknown
  Description of Unknown: RightRegion for integrase B9639 sequence
tcggcgctgttgggtgcccaatctgagaacttcagcactttgttatgtccaacgggcacgtgagcgcccccccacgtcctgacatgcccagcacctaggatcgctatcgagacagacgtccacccggtggtcatgccaccgggtgttgtatttcttcttggagtccaaggcccgcatcgcaggagccagcagattgcgaaattctcctaggacgtaggattaagtcgcgttgacgactactacctaggctgctacgctca

SEQ ID NO: 35639 - DNA, 260 bp, Unknown
  Description of Unknown: RightRegion for integrase B9640 sequence
gcctcacccctcgtcctccgctgggccgatctgccccccctggccctcccggccgccgcgtgatggccggccccgccgggtacgcaggtaccgctccaccgcctcgagcaccgtcccgttcacgctgcggtgctcgtccttggcgagccccttcagcgccgccgccagggggttggggaagcggatcgagatgaccgtctcgtcgtctttcggcataccggcagtatagccacagtgccactatttcaatgcaatcgtaa

SEQ ID NO: 35640 - DNA, 260 bp, Unknown
  Description of Unknown: RightRegion for integrase B9641 sequence
aattctataaaaagacagcatcatgaattccaaatcagatatgatgctgaaatatacatataaaataaggctgggatcagtaagtcccagcctttagtttattcgattggatcaagagcatcagcaattccactcatgatataagctacacatggtaccgctaccgaatttcctaatgctttatatcttgaagcatcggattcaggataggtccaattgtcaggaaaaccctggagcctttcgcattccacaggcgtcaa

SEQ ID NO: 35641 - DNA, 62 bp, Unknown
  Description of Unknown: RightRegion for integrase B9642 sequence
acttatggaaaacgcaactatagaagagataaaaaaagcaggacttgctgggcattatgctg

SEQ ID NO: 35642 - DNA, 260 bp, Unknown
  Description of Unknown: RightRegion for integrase B9643 sequence
gccgcggtcgggctcctcgatcttgagctcggcttcacgctcggtctgggcaagtcggcgtagccgcagaaattcccggatagcccgcgccgccgccgcgtcatcgcccaggtacgtgatgctgacgacgcgatagggctgctcgtctggtttgcgcttgggctcggcggtcacggcgaccagtgtgcggccgccgcctgactacctaacagtgcgacaatgcgtccaatcttcagtcgcgggcgtggccgttgcgtcgc

SEQ ID NO: 35643 - DNA, 260 bp, Unknown
  Description of Unknown: RightRegion for integrase B9644 sequence
ataataaaatcaaagagattcgtaattaatttaccggaacgctggcataggaaggtggcgtgatggctggccagcagctggtcccgaagaaggacagtattaatttccattgcaaggcctgcgcttcaggcctcccgcatttttttgaagctgcacccacagaggtcattgacgctccggatcaggagcaccatccctataattatttcgcgccatgccccagctgcggcagccttgccggtcaggtgcaatgggaaaag

SEQ ID NO: 35644 - DNA, 260 bp, Unknown
  Description of Unknown: RightRegion for integrase B9645 sequence
gaagcaaaccccgatctccgcgggcggatctacacgctcggccgctatcgaatggcggcctgatgaatgtgctcgatctcttcagcggaatcggcgggtttagcctcgggctcgagcgagccggaatgcgaaccgtcgccttctgcgagatcgatccctactgccgccgcgtcctcgccaagcactggccaactgtccctgtttggggagacatccgaacccttaccggccaaattattgccgacgccatcggcagtcag

SEQ ID NO: 35645 - DNA, 260 bp, Unknown
  Description of Unknown: RightRegion for integrase B9646 sequence
ccaattgaccgccctatcctgccccgctactgccctaaacacggcacccccctacccttctgagaacattgcgacttctccagcactcgttcgagtactacaccaaccgccacattcatctgcgccgcgcgggtggactaatctgagctgccccgctgcggattagtccaccaccgccctgagcccaacagtcccaacgtgtgccagatggacagtttcgagtatgttcagagcgaatcttccagccctgccggctggtt

SEQ ID NO: 35646 - DNA, 260 bp, Unknown
  Description of Unknown: RightRegion for integrase B9647 sequence
agtacgccacactaccccgacccggaccgcctcgcccgcctggtgcgcgccctcgccggttagcccaccgtcttcggctcgaccaggaacaccgcccccacgaagaccggggtcgtgcccggcccggccacccgccccaggagccccgccggcgccggcccgggcgccgcctcgggcgccccggcgtccggcgccgcgaccgcccgccggaccgcctcgaggcccgcctcggtgcccacgaacgtcgaccccgggcgcgc

SEQ ID NO: 35647 - DNA, 260 bp, Unknown
  Description of Unknown: RightRegion for integrase B9648 sequence
tggaaggatgcgtataaaggcagtttcttctttacatacgaaacctcggtggttatatcttaatagcttggtcgaggtttaaaacaccgaaataatgtctaaaatcgatagtagcgggctacatgcaaaagacgcagcgaaaaccctatacctataatataaggagatagagatatggcagacaccccgatggcgatccgggcgagcgacgagacgaaggcgctgttcgccgacctggccgagcgcggcaatttcgagaa

SEQ ID NO: 35648 - DNA, 260 bp, Unknown
  Description of Unknown: RightRegion for integrase B9649 sequence
cggcgcacagccaacgggcatcaccccgcgagcatcgccagccggtgggagtcggtccaatgaccggccaaccgagcttaacagtacagcggagcccctacgggggctccgtttgcattttgggggaccgctgggcccggctgaactacccgcaagggaagaagcgctggcacgctacgaacggccaccgggccatctgcggatcggtggagttcgaccatccacgggccgagttcagcgcggtgaagccggagcgcggc

SEQ ID NO: 35649 - DNA, 260 bp, Unknown
  Description of Unknown: RightRegion for integrase B9650 sequence
gaggccacaccttactttggacacgaaattggtagtaaccagatctacctatctttgcagtgatttgaggtcgtatggacgctggtttctatggggcgaaagcggagccggggcagctgaaggatcgcaatatgctgctccgcgatgcttgcctccaactgaacgacatccaccaggaagtccaacaatcggactacctcggccataacttcatttcccgcgccttcgaccttctttccaaactcgctgacgatctggag

SEQ ID NO: 35650 - DNA, 260 bp, Unknown
  Description of Unknown: RightRegion for integrase B9651 sequence
agtttcaagaaactccgattagtttgcaaccctacgccgcgcttcgtgcttctggcggcttagcgagcatccgctccagcagctcgcggtcagcctcaaactgcttgcgatcaccgtggccggcttccagttcgtccctgatgtgccgcagcgcgatctgcgccaggatctcgtacacgcgccacggcacctgagcatcggccacgcccaccagtctgcgccgccaccaggtgctccggcgggacacattgggacaaatc

SEQ ID NO: 35651 - DNA, 260 bp, Unknown
  Description of Unknown: RightRegion for integrase B9652 sequence
tacggacgagggagtcatgaaattcccatccagatcaatatatgtttcttttcactgaattagaaaattcaaaatggaagaaatagcctcgcgtcaagaacatatgctataatagaggagatagaatacgtctcgagagatcatgaaagcatggtctcttatttttatatctaaaaaaaaggaggaatgctcatgagtattacaccggagcagcttatcgaaaagtttcaatatgctctcgacaataattggggatacat

SEQ ID NO: 35652 - DNA, 260 bp, Unknown
  Description of Unknown: RightRegion for integrase B9653 sequence
tacggacgagggagtcatgaaattcccatccagatcaatatatgtttcttttcactgaattaaaaaatttaaaatggaagaatagcctcgcgtcaagaacatatgctataatagaggagatgaaatacgtctcgagagatcatgaaagcatggtctcttatttttatatctaaaaaaagggaggaatgctcatgagtattacaccggagcagcttatcgaaaagtttcaatatgctctcgacaataattggggatacatt

SEQ ID NO: 35653 - DNA, 260 bp, Unknown
  Description of Unknown: RightRegion for integrase B9654 sequence
gaccgcccgattttgctgggtcgatggcgagaggatgcaagtcatcaggttaaagtggcctgaaggcctgtcacaaaaccccgcccaccccggcggggtttttcttttgatctggatcaacaactcagaacgccgccagcgcccaatcgcggcttgcactaaaatccattttgctcccgatgacgccatgaaactcccgatccccatcgccctcccggcggagcgctctgcgcttgcgcgcctctacatcgacctgtcga

SEQ ID NO: 35654 - DNA, 260 bp, Unknown
  Description of Unknown: RightRegion for integrase B9655 sequence
cggcaccggatggaattgcccgcgcaggtacttgcgcagctacagcgagttgaagagggataggctgcccgataaggggtcaacaagggcgatcaaggaacggccgcagtctcgatgctgcggcctttatcctgtcattgtagggtgtcttagatacgcggtacttcgtattcctcaccttcaatctcaagcacaaagtggtcttcgaagcgcttcacgaagacaggtgtttggtcaaacatgatgcaagcttcatcctc

SEQ ID NO: 35655 - DNA, 260 bp, Unknown
  Description of Unknown: RightRegion for integrase B9656 sequence
cccataccgcttctctggtctgaccagcgcaagctctatggctttgaagaaaggaaacaataatgaacaataccaatcaatctgcccgccgccgttttgatgccgattttgctgtcagtgccagaattcggcaaatgcgtaatctgcttggacgctcgcaaatggatgttgccgctgccctaggactcacgtttcagcagctccaaaagtatgagaaagcgcaaaaccgaatatctgccggccggctccaccagcttgcc

SEQ ID NO: 35656 - DNA, 260 bp, Unknown
  Description of Unknown: RightRegion for integrase B9657 sequence
gagctggcccggcggtacgggatcagcgaggcgcgcgtccggcagctctgcggctcccggtagccgcctgacgagacggaccccgcaatccggcttgccgcaactggcgcttcgccgcgctgcgtcatacgctccggccgggctcgacgccccagaacgacaaggagtcttccatgcgcaccctgcgcgcggccgccgtggccgctgccctcgcctgcacccccctcgcccacgccgacgagatctcgtacacctacctc

SEQ ID NO: 35657 - DNA, 59 bp, Unknown
  Description of Unknown: RightRegion for integrase B9658 sequence
cgtcttggcattctcaccggcggcggcgacgcccccggtctcaacgctgtgattcgcgc

SEQ ID NO: 35658 - DNA, 260 bp, Unknown
  Description of Unknown: RightRegion for integrase B9659 sequence
ggtgcagaggatgtcgtaccagacatacgccgacgcactcagagcgctgctaagaacgtctgacagcagaacagcccaggattgctaccgggctgtcagggtatcagggagagcgtcctagttgcgttgtcgggctttctgccgggctacatacagttgaagttccagagggttatgcccccaagcgatccgcgcgggtggaatgtggcaacgccgttgtgcgcgaaagcctgcaagctgcgggcacttgccgagtggcg

SEQ ID NO: 35659 - DNA, 260 bp, Unknown
  Description of Unknown: RightRegion for integrase B9660 sequence
gggcgtgtttcctccatcgtgtttagaaatggtcttactcatactttcatataccaaaaatgataccggcatgaatgtcgggaacaaaataacccagaagccgcatagctcctgggtttcattttatcccattattcaattatttttcagatgtgggattccttacttttgtaagaaaacggtgttattctataaacatggcatccccgaacctttaggaatgtagtcgaaatgttacatttgtcagtatatcatatata

SEQ ID NO: 35660 - DNA, 260 bp, Unknown
  Description of Unknown: RightRegion for integrase B9661 sequence
ctgagccggcgggtgcggatcgagtggcaccggcccacggaggagctgggagctgtggcgtaggccactctcagatgaggacccgtactgctcatatgagcggtgcgggtcctttctatgtcacgaaacggtaacggacccctgggccggagtgacgttcggcgggagccgtgacgttcagcgcgcgggagcggggcctccacaccctctctgaccagtcaagatgatggtagtgacgtttgaggtagtgatctgagtac

SEQ ID NO: 35661 - DNA, 260 bp, Unknown
  Description of Unknown: RightRegion for integrase B9662 sequence
aatcgtaaggtagatcctgtgcgaattagggtagtagacataagattgaatatagcagtataaaaaagctaagatctttcgatctcagcttttacttttttatatatatttatatctatcatttgttttttatataaactataaagcatagatagttgtactttcttctttatttctttattatcaattactaattctttttcttctaccattttgcccccctcccagtacattatatgaaagagagattattttagacc

SEQ ID NO: 35662 - DNA, 62 bp, Unknown
  Description of Unknown: RightRegion for integrase B9663 sequence
gacggtctggtgtcaaatatcgtgttcaagaatggattatgtcacacatttattttcagata

SEQ ID NO: 35663 - DNA, 62 bp, Unknown
  Description of Unknown: RightRegion for integrase B9664 sequence
gtgacctcgattcgcttcaaaaacggcatagagcaccaatttttctaccgggacccagaata

SEQ ID NO: 35664 - DNA, 260 bp, Unknown
  Description of Unknown: RightRegion for integrase B9665 sequence
attgggagccgattgtattcgggtcgtgatgtgaaccaatcatctatctacattcctttctaacatttacccaaagacggtttgccaaggaaagtgtaccactccccctttcgagggggagtggatagattttgcgcgttttttgagggtttgccttgcgcgcttactacaacgaactcgacgccgtgaaagccgaggttttgcgcgaagcaatcagggcgggcgcaatcgcgccaggggacgtagatgaacgcagcgtc

SEQ ID NO: 35665 - DNA, 260 bp, Unknown
  Description of Unknown: RightRegion for integrase B9666 sequence
accgtctacgctgtcgacgacatccgcttcaccttcaaaaacggacaggaagtcaaagcctgaccccagaaacgaaaacggctccctgccgctggaggttatctccggtagcagggagcttgatattatgtcctttcttatattttgtagtagcccggattagcattaattacatacttcgcaaattgaatcccagtctcaacccagtcctcaccaatatgactcatgtcatcgttcctttgatgtatctcataatcgtc

SEQ ID NO: 35666 - DNA, 222 bp, Unknown
  Description of Unknown: RightRegion for integrase B9667 sequence
gatttgatgattactaccatagccgccacaagcgacagcttaaatatcacatggaaaatctgacgggtggaacccctcccgtcagatacctaccctgtgtagtcccttgtaaactgtactttttgttgtatcttagccaaaatactttctattacaagtgttactgttataaaggctcctacaagggtatagtagtttaagccatacatcaatggcaaaaga

SEQ ID NO: 35667 - DNA, 260 bp, Unknown
  Description of Unknown: RightRegion for integrase B9668 sequence
accgtctacgctgtcgacgacatccgcttcaccttcaaaaacggacaggaagtcaaagcgtaaaccaattatgtatataaacgcctcactactggttttcataccagcggtgaggcgctttcttattccattcaattttatgccaatatttcatccaataatatatgatattttttgggcagagacgccaccattagtttataccaaatctctctggaatacgttccattctctatacaccaaatcttataatgcaattt

SEQ ID NO: 35668 - DNA, 260 bp, Unknown
  Description of Unknown: RightRegion for integrase B9669 sequence
atcgaaatcacgtgggcgagccctgcggaagacgaggaagataacgagtcggtaacaggctagggagtcgatgtcgaggcctgcggaggggcgggagcgtcgcgcgagccgggcgcagacgtcgagccgcctccgcgtcctccacaggcgcctgtggataactccagagagttaccagtgacgcccaagaggccacgcatagtagctacttaggtcatttctctagccaaagtgtcaaactaactagtgttttcaagtcc

SEQ ID NO: 35669 - DNA, 189 bp, Unknown
  Description of Unknown: RightRegion for integrase B9670 sequence
cgacgctaccgtgagcggcgacgcacgcaagcggtcgtgacgccgaccgagacgagtggttaatggtgttcaggagaatcgtgcgcatcacttcctgctggagcaggcccatctccagcatcacaagattggccacgtccgagggcgagcgcacctgcagccgcgccgcgcccggctccaggaggagcc

SEQ ID NO: 35670 - DNA, 260 bp, Unknown
  Description of Unknown: RightRegion for integrase B9671 sequence
accgtctacgctgccgacgacatccgcttcaccttcaaaaacgggcaggaagtcaaagcctgaccccagaaacgaaaaacggctccctgccgctggaggttatctccggtagcagggagtttcgcttactgttgatggccatcggtatgccgtcagctggttatgcccttggtcaaggctgccgcccacaggataaactcctccacagtcggttctttgccggagaagtgaaacgtcgcccaccgtgcctgaactgctgg

SEQ ID NO: 35671 - DNA, 260 bp, Unknown
  Description of Unknown: RightRegion for integrase B9672 sequence
tcaagaacctcttacacatgtgatcacaatcaacctctcctaagttactttgtcgagggttgacaccctaagtttacacccgcatggaagcgggttgacaaccaatcggtgttttgttattgttgagctatgccactagacggaacttctgagactgttggttatttttcaacgacgaatgtaacttcatcgcccaatacatatcaatgttttggtcataccgattggagagaagatcattggaagtgtgatgaatgtca

SEQ ID NO: 35672 - DNA, 260 bp, Unknown
  Description of Unknown: RightRegion for integrase B9673 sequence
gaagcaaaccccgatcatcgtggtcagatctgcacgttcggccgctatcgcatggccgcgtgatgcgccctatgtcggctagcctcgagctctgaaaacgcaccagcggccacggctgcgcgaatggcgccccgaacaaaaagagcgccgcccgggggagagcgacgcctcagtcgtgagtggggttacgttagtcagaacgccgggaccgggtaagagtcccggtagcaccgcgagcatagcacgccaccaagcaattc

SEQ ID NO: 35673 - DNA, 260 bp, Unknown
  Description of Unknown: RightRegion for integrase B9674 sequence
gaagcaaacccggatctccgcgggaagatctacacccttggccgctaccggatggccgcgtgatgaaccggccgccagccctcgacctgttttgcggggcgggcggcgtcagcatgggattgtatcgggcaggcttcgacgtgaccggcgtcgatttcagaccgcagccgcattatccgttccggttcgtccaggccgacgccctgcgcccgccgttccggctgaccgactttgctttcgtatgggcgtccccgccttgc

SEQ ID NO: 35674 - DNA, 260 bp, Unknown
  Description of Unknown: RightRegion for integrase B9675 sequence
gaatggattatagaacgtgaaatagttaatggatttacacaaaaaaagggtagtcggaaatgactacccttatttgttatgtaattcgtggtggcattcttcgcaaagtgccattaagttagttggattaaatcctaaatctttcatttctaaatctgatgtagctgttgaaattggtgtaacgtgatgtacttcttttgcaggtcttactacaccgcgttctaagcaacgttcgcacagtggatgggcacttatatagg

SEQ ID NO: 35675 - DNA, 260 bp, Unknown
  Description of Unknown: RightRegion for integrase B9676 sequence
tttggcctagcacttaacgccgtttgggatgcaccccccgccagcaaggccaacgccgcctaaatggccgatacatactatggaggccgagcgttatgggggtacgcttggcctctgtttacttcagcccacgccagtgatttgtacgcccgcaagttacgggggtggaagaccaaaacgtggaaagtgcaggcctcagccgccaatcatcgccacagagaaaccgcccaccgcacagaatgcctatgggccaattggta

SEQ ID NO: 35676 - DNA, 260 bp, Unknown
  Description of Unknown: RightRegion for integrase B9677 sequence
gcgcacgccacggctccttccggacgttttccttccaccaatatgcttatcgttttgcattaatcttttaatgtttccaaaattttgttatgtttgcagaaaagatctatatgagaaagtatttcgaaatagactcaaaagagtttcctcccaaacttgtggatctggcttatgaagaggcgagggccgcactcaggaacgacttcgatgccatagccaagacccagcagcaggttcagacttttttgggatggtatctg

SEQ ID NO: 35677 - DNA, 260 bp, Unknown
  Description of Unknown: RightRegion for integrase B9678 sequence
cgaacacttaagctctacagtcgcgcacgtacatatgccatcggcctaccactggcagcgtaactaacgcttttcatcctacctcaacaagatcctgcagacatgcgaaaggggccctcgttcgactagcgagggcccctgtgttgatgactgcgtgattgttctctagcacgtcatggatgccgcaaagacgagcatgctcacgatgccggtcacaagagtgaccagcgactcgtagaggaacgtcatggcgatcaccg

SEQ ID NO: 35678 - DNA, 62 bp, Unknown
  Description of Unknown: RightRegion for integrase B9679 sequence
cgtccggaaacggttgtgttccgcaatgggctgtcccatacattcacttataaggattcttg

SEQ ID NO: 35679 - DNA, 260 bp, Unknown
  Description of Unknown: RightRegion for integrase B9680 sequence
caaaacacaaatataaatactaaccccttgctaattaatttcaaaaagaatccatctaagtagtacatactcaaaaagcactattaatactttttgtatttatagtataaaatgctagtactctttaatataaaacagaagaataattcccctttacaatatattttatatcataaaggggtttaaaattttcggtgaaagattaaattatcttagatttatactgatttaagtcaagatgaattagctgaccattttga

SEQ ID NO: 35680 - DNA, 260 bp, Unknown
  Description of Unknown: RightRegion for integrase B9681 sequence
cgcgagttctgctcgaacgtgtgcaagcacgcggcgtggcgccgcgtgcggacggccgcgtgaagatcacgatgacgaggtacagcgacacgttcacggtcacgcgcgaggaactcgacgcggcacgccgaacctcgccaccgatgcaaggtgtcgcgtacatggtcgccgagcgccggcggttcgagatcggcgaccaactcgagcgcgagatgtttgccgcgatcgagcatgatcgcgcgtatcgacgcgactacccg

SEQ ID NO: 35681 - DNA, 260 bp, Unknown
  Description of Unknown: RightRegion for integrase B9682 sequence
aactaccaaaatacaagtatgaatacaaatgcattaatagtttctctaagcacaaaaaaataaattgattcataagcacatgcactaattcaagaagtttaataccctctgcaatagggacaatataagagggcataattaattatactgttttatcacttaatttaattttaaataccatttgaccattctttttaattgtaaatatcaatatagttttaactttaggatcttttttactattttccatgttgcattcc

SEQ ID NO: 35682 - DNA, 62 bp, Unknown
  Description of Unknown: RightRegion for integrase B9683 sequence
tgggacggaagaattatatcaatacagtttaaaaacggtattgagcatgattttttatatta

SEQ ID NO: 35683 - DNA, 260 bp, Unknown
  Description of Unknown: RightRegion for integrase B9684 sequence
tctggtgtaccagcagtaacacatccgaacacgcaggtcacgatcttccggatcgcggtctgacggatggaagaaaaccggcccccgcggccggttttttgctatgtaaaaaacccgcccgtttccaggcgggaaaggttccccttttttagcgctgatccatcttgtccatcagctttttgatttccatccgcgtcacgtcgtccggcgcgtcttccatcatctctcgcagctggtcgtgcatgtcgcccgtccggctg

SEQ ID NO: 35684 - DNA, 260 bp, Unknown
  Description of Unknown: RightRegion for integrase B9685 sequence
acacaaccacagaatttcataattaatgttactagaaatgttaaattttctattgcatcataatcaaaaaagtgctattattaaatagcacttatcggggtgtggctcagtttggtagagcacttgcttcgggagcaaggggtcgctggttcaagtccagtcactccgaccaataaaaaaatacccctcaacccaaatagggaagaggggtataatcatttttgtgccttgtaacccttatggctgtaaggctaaaattg

SEQ ID NO: 35685 - DNA, 60 bp, Unknown
  Description of Unknown: RightRegion for integrase B9686 sequence
tcgatctccatcccgctcgtggtggaggagttccgccagccgcggaagggcggcggcata

SEQ ID NO: 35686 - DNA, 260 bp, Unknown
  Description of Unknown: RightRegion for integrase B9687 sequence
aaaatcaactatgtggatggatgcgaaaaggaatttaactacacttacgcatttgcaatctaaataatatacaaaagatgaacggaagagcagagatgtaattttttgacatttaaccaaatatctgatagtatgaaaacatactaatgacgacatcggttccaattcccggaacaagatgtctttttgcgtttttagggagtgttttttatgaatcataccgcatatgacgtaatgagagaatatatgatcgagggatc

SEQ ID NO: 35687 - DNA, 260 bp, Unknown
  Description of Unknown: RightRegion for integrase B9688 sequence
gcgcgcgttgcttgtgttgcgtttcaaaacgggcttgaaatacggttcatatataaagcataaaaagaacgggcggcgttactgctgcccgttttgtaatgctttgtcgattgctgcgttgataaattcgtttacgctctgccctgctgccgctgccgcttcttttactaacgctttcttgcctttcttcatggtaagatttacgcggtcgtacttttcgcggttatagtcgttttgataggcgatttgattaaatacgg

SEQ ID NO: 35688 - DNA, 260 bp, Unknown
  Description of Unknown: RightRegion for integrase B9689 sequence
aatgtaaccattcaaatggtcgggagcgtgttcgttctgtactgcgagataccaactcgttaataatggtaagccccggttctttcatgtttttggtgaaagagccggggtatttttgttattttcacccgtttttcggaagaatttgccgaaagtagtagtttcctgccaaaatccagctaagccgatttgaaatcggtagaattttggataaaggagattggcttatgattaggattttactgtcaacgcgtctcggc

SEQ ID NO: 35689 - DNA, 260 bp, Unknown
  Description of Unknown: RightRegion for integrase B9690 sequence
aaagggcgcgttatgtctatcgtcttcaagaacggccttacccacaagttcctgtatgaataaaaggagcggttgagcgtttttaattgcgctctcccgcccctgttatcgggctttcaaaaatctttcaaagaaagaatctgtatctaaatcacaagcatagcatccctcatgcttatggggtgtatgcaaaatcttattttataatatatcatagccctacgcgaatgggaacccttcaaagtcgtctccggctggcg

SEQ ID NO: 35690 - DNA, 166 bp, Unknown
  Description of Unknown: RightRegion for integrase B9691 sequence
gatggccgggtgcaaaccatcgtgttcaagaacggcctctcacacactttcatcctgaaatgacaaaagacccgacggcataatcgccatcgggtctttacttttttctacatacaaatatcgcaaaaagcgcgaattttgtgtcaaactatcagcatagcatcgc

SEQ ID NO: 35691 - DNA, 62 bp, Unknown
  Description of Unknown: RightRegion for integrase B9692 sequence
gacggtctggtgtcaaatatcgtgttcaagaacggattatgtcacacatttattttcagata

SEQ ID NO: 35692 - DNA, 260 bp, Unknown
  Description of Unknown: RightRegion for integrase B9693 sequence
ccgttatcgcaacagcagaaagggcgcatcatcgccttcggccggtggagggctgcagcgtgacaacaaccgagcgccgacctgatgagatggcaagggtttggcatgcggagccaatcgacatcactgcatggagctttttcgaggacgagaatcaatggcgtgatctgctggcggccgggtttgccgtctacatcaacaagaccctgaatgacgttcttgagaaggacccgccacatctttggtttgccgccatgtgg

SEQ ID NO: 35693 - DNA, 260 bp, Unknown
  Description of Unknown: RightRegion for integrase B9694 sequence
actactttcacaggtataaaatcactgatagaagaacaattaatcttcgcccttggttcatgaaacacctgaataatcaggtgttttttagtatataaaaacatacagacaaaaagaacaccttatacaaaggtgttcttcatatgttataatggttgggctggtcgggatcgaaccgacgactcctaccctgtcaaggtagtactctcccgctgagttacagcccatcagtcggaacattgaataatataacatacata

SEQ ID NO: 35694 - DNA, 260 bp, Unknown
  Description of Unknown: RightRegion for integrase B9695 sequence
tacttagaggattatatgtactgtactagaaaactggggctttatgtgcagttagtagcataaattatataggggttatctaaatatatttccctcctgtgattaagttatataaagactaaatcacaggaggtttatttttatgataacagtagaaaaactggaaaaaggtacttattttgatgatgcttttaagatctcatttagatacgatcccactactgtagctaaggtaaaagagcttgcagagcggagatatt

SEQ ID NO: 35695 - DNA, 260 bp, Unknown
  Description of Unknown: RightRegion for integrase B9696 sequence
tacttagaggattatatgtactgtactagaaaactggggctttatgtgcagttagtagcataaattatataggggttatctaaatatatttacctcctgtgattaagttatataaagactaaatcacaggaggtttatttttatgataacagtagaaaaactggaaaaaggtacttattttgatgatgcttttaagatctcatttagatacgatcccactactgtagctaaggtaaaagagctggcagagcggagatatt

SEQ ID NO: 35696 - DNA, 260 bp, Unknown
  Description of Unknown: RightRegion for integrase B9697 sequence
cagatattaagtaatgatgatagcctatcttctgtccatagcagcacaggcagctatcgctgagaagaatgcataattaacataattgttaaggggcaaagctaaatatcctctaaagaggtaaaatagccaaccagccctaaagtgtccaaacgtaaaatttgaccttggagaattgtagaaatacagttcttcagggtcttttttgttacattacacagcggtattcttttgtttaacaaccgtagcaagaattccct

SEQ ID NO: 35697 - DNA, 260 bp, Unknown
  Description of Unknown: RightRegion for integrase B9698 sequence
tacttagaggattatatgtactgtactagaaagctggggctttatgtgcagttagtagcataaattatataggggttatctaaatatatttacctcctgtgattaagttatataaagactaaatcacaggaggtttatttttatgataacagtagaaaaactggaaaaaggtacttattttgatgatgcttttaaaatctcatttagatacgatcccactactgtagctaaggtaaaagagctggcagagcggagatatt

SEQ ID NO: 35698 - DNA, 260 bp, Unknown
  Description of Unknown: RightRegion for integrase B9699 sequence
tacttagaggattatatgtactgtactagaaagctggggctttatgtgcagttagtagcataaattatataggggttatctaaatatatttacctcctgtgattaagttatataaagactaaatcacaggaggtttatttttatgataacagtagaaaaactggaaaaaggtacttattttgatgatgcttttaaaatctcatttagatacgatcccactactgtagctaaggtaaaagagctggcagagcggagatact

SEQ ID NO: 35699 - DNA, 260 bp, Unknown
  Description of Unknown: RightRegion for integrase B9700 sequence
acaacacgagacggcgtcatcgtgctggagtcgcaggcggaggcctcgatggcggcggtctgaggtgcgagattcccgagggatttcgacggattcaacttccggaggggcacggatgagcgagcgacggaacgggtcggacgtgggcggacaactcgacgacatgaccgagcccgagctgcgccggatcatgaccgcggtcgcccgcgccgtcgaggcgcaattgccccggggcgtcggattcgtcgtcctggccgccg

SEQ ID NO: 35700 - DNA, 260 bp, Unknown
  Description of Unknown: RightRegion for integrase B9701 sequence
ggccgcgtcacctccatcacattcaagaacggtgcgacccacacattcacctacaagacatgagaaaagccccggcctcatatactgaggtcggggccatcttgtgcagtctatgcagtatcgccgcaacattatacgtcaaaaaagttgttcaattttataagcatcccctcaaagctaacgatgcgtgatgcttttcggttatccacgcggctttttcaggtttttgcgtcggttaaggcgttttccctgaaaaccct

SEQ ID NO: 35701 - DNA, 260 bp, Unknown
  Description of Unknown: RightRegion for integrase B9702 sequence
tggacggacgaaaagaaagcggaagctcgagtggctgccggaaagaggaatgcacatgcctgaagttacgatgatccccgccagcatcgcccgcacatccgccaaagcgtctaccggtgttcagtgccgtcgggtcgcggcctatgcccgtgtttccaccgatagtgaggagcagcagaccagctacgaagcccaggtggattactacaccaagtacatccagagccgcgaggactggattttcgttggcatctatacgg

SEQ ID NO: 35702 - DNA, 260 bp, Unknown
  Description of Unknown: RightRegion for integrase B9703 sequence
cgcggatatgtggactacctaccttccttagttgagctagctggcgcgctgtctttgggttgaggcatcgcggccttcttctcgggctgactcaggatctcgcggacctcgtccgcgagcaggcgcgctagctcgtccagtaggtcctgccgcgtgggcttgtccgccatgcccaccagtctgcgccgccaccaggtgctccggcgggacaaaccgggacaaacacaaattttgggcgctgagcgattttgcgcgtctca

SEQ ID NO: 35703 - DNA, 260 bp, Unknown
  Description of Unknown: RightRegion for integrase B9704 sequence
aaaacttgcattaagacacaagatatggtatttttcaagtataagtaccttttagcactataagagaaaaaatgggagtggaatcaatgatacatacagcttatgacgtaatgaaagagtttttaatcacggatgcagaccttgaaggtaagtacggaatcccgaaaattcaaaagacttttattcatcccggcaaagatactgtagactttacggagagctttagccggaagattaagaaccaccgggaactggatgta

SEQ ID NO: 35704 - DNA, 260 bp, Unknown
  Description of Unknown: RightRegion for integrase B9705 sequence
aaaacttgcattaagacacaagatatggtatttttcaaatataagtaccttttagcgctataagagaaaaaatgggagtggaatcaatgatacatacagcttatgacgtaatgaaagagtttttaatcacggatgcagaccttgatggtaagtacggaataccgaaaattccaaagacttttatccatccaggcaaagatactgtagactttgcggagagcttcagccgaaagattaagaaccacctggaactggatgta

SEQ ID NO: 35705 - DNA, 260 bp, Unknown
  Description of Unknown: RightRegion for integrase B9706 sequence
ccttccggcaaagctgctgcgaagcaggcaccgaagcgagcccgaaagaccactgcagcctgaccccctataagcgcaaccctggttgcgcaaatgcaccggcatcagttaccctcccccgcaatccgcgcaaccactgtgcggtcaataagggagagggcatcgaatggacaagcggacgtacctccgttggaccggtgaagaatggatggcagtgctggcgattgcgctgccgctgatcgacggtggcacccaaaaga

SEQ ID NO: 35706 - DNA, 260 bp, Unknown
  Description of Unknown: RightRegion for integrase B9707 sequence
ctttgtgggggcacctacataatccgcggtaataaatctatcatggtcgaatggagtaaatgattatgatagatatgctgtttcaagaagttgcaactcacaaaaaaacaatgcccgatcttgcagagtttatgaccacccaggaaaccgctgagaagttggatctaactattagggcggttaatcggctagtgtcaagcaaaaaacttgatgggatccgagtggggaggatgtatctgatttcccgcacgtcgataaag

SEQ ID NO: 35707 - DNA, 260 bp, Unknown
  Description of Unknown: RightRegion for integrase B9708 sequence
gggaagcgtgtggacgctatccggatgaagaacgggatcacccacaaatttatttacaaatgaagacacgaaaaaaggcggggtcgcaagtcccgcctttttcgtgaagaagtatttgattatgattgagaatgaaaagtccattcctgaactgctaaaggggcaggcccgggcctgtccgttcccgggccgttggtgtgtagctatgaagtttaccggtcagaccttagctgtcattgatccgtgccggggtgttcact

SEQ ID NO: 35708 - DNA, 260 bp, Unknown
  Description of Unknown: RightRegion for integrase B9709 sequence
acagccaaaacccccggggaatctgaggggcgcatggtcgtgcccctggccgaagtggcctgaccgccctcccctgcccccgacaagcgaacgcccgggcagcgggcgggcccccgggcgctctcgctcgtcgtcggagggtgaccccgaggcggcgagctggagagggaggctagcacgatcgggctgcctggcctgaccttcgcacgggtacgttttccgcggggcgcacagggcgcgtcgcgggacccatggccgaa

SEQ ID NO: 35709 - DNA, 260 bp, Unknown
  Description of Unknown: RightRegion for integrase B9710 sequence
gggggaatgttggttgcggggacccgcatcagccaatccccccagttcctaatcgtcgcgtaggtatcacccagtgccgtctccagatttggcgtcaaggtcgcgcagccgtgtccattcgcgctcctcaagagcagcacttagcaccacgtccacctcctcgaggtaactcatccacatgggcctcccctggtactttatgttttcaggttggcccgcgttgcggcatagcgctcgcgcggctcgctccctgggggatt

SEQ ID NO: 35710 - DNA, 260 bp, Unknown
  Description of Unknown: RightRegion for integrase B9711 sequence
ggcggaaaaattacgtcattgcaattctcgaatgatgttactattcggtttgtctattcgtaaaacgaaatcccccgagctttgtagctcgggggatcgtgctattttattcatagttatacatagcaaaaaagtgctgttttaatatacatcggatacaaacatcaagtcgggatgttcaaaataggatcatatcgaaaaaaactcatactgcaaataacagcttagaccgcttgattccagtgcttttgcgggctttt

SEQ ID NO: 35711 - DNA, 260 bp, Unknown
  Description of Unknown: RightRegion for integrase B9712 sequence
aatgttactaaactgtccggttcaaagtggcttgggaagtttgatctgcggaaatcggaataacttatttcaaaaatcgtccgaaacaaaaataacaggagacgctttttgtggaacgtctccctgatggattgtttaggctgttgcgaatagaatgcaaccgtctgactcgctgacaaaatcactgacaacgtcatcgttatacatgataatatagtcatagaagctgcccacgaggtcataaacgtccggaacagtga

SEQ ID NO: 35712 - DNA, 260 bp, Unknown
  Description of Unknown: RightRegion for integrase B9713 sequence
gacggcaggatcacagccattacattcaagaatggcataacttacaaatttcactacaaatagaaaaagcccggtctcacaacgagaccgggtcttttacatacttattcgtaaggatatgaatttgaaaaccttgcattttcatacacataccccgatgcgtttttgtcaggatggggcatccttacgttttactccgaacatggcgtttcaaaaagtgcgggatttaccgagttttgcggcaattacgaacatttcat

SEQ ID NO: 35713 - DNA, 260 bp, Unknown
  Description of Unknown: RightRegion for integrase B9714 sequence
aaaacgcctgccctgccgaggcccggtaccttgcggtgccgggccttttcattgcaaaactagctagcgggagaattcgtcggctcaggtaccgtctcgccatattcttctgcaaactcaacagtgccatctttcgacgtgcagacacctgtgacctcgcctttttcgatccggaaaacagctttccactttggataggaaatcattttctcaagaccgcttgcggtgatgctgactttctcgggctgacctaacttgtc

SEQ ID NO: 35714 - DNA, 260 bp, Unknown
  Description of Unknown: RightRegion for integrase B9715 sequence
tcatacccggtcgaaatcgtgttcaagaacggacttcggaaccggttcgtcctgaaggactgatccgtccccttttcctttcccctttgtccctaaaaactacaccataagaaaaagccgctgttttagcggcttttcgtttcccgtgttcagtattcatttgacaccccatggtgaccgtacacgcagacaaggggcgaccgatttcgtccgatttcttttttactatttcccggcattttttaatgaaccaatactga

SEQ ID NO: 35715 - DNA, 254 bp, Unknown
  Description of Unknown: RightRegion for integrase B9716 sequence
ccccgcgtgatgacgcatgaaacacgaaaaccttatatttcattaggtacaacaatatattaagcgcatgaaattttggtgaacacaatatttcacttctgttgtccgttaaaaacgaacaaaatcgcggattgaaaaaaatctatcttctaataattcgcgtatgcgcgcgcgaggccagcccaggcggcccccaggtgaatgaaataaataaaaaaaatatattttttagtcaactcatgcgctcgcagccc

SEQ ID NO: 35716 - DNA, 260 bp, Unknown
  Description of Unknown: RightRegion for integrase B9717 sequence
cgtatcagtccagttgatataccgattacgcttgcttggttaagtggcagcgaggttgtataaggtagggaaattggaatattaatggaaatttcccagttacaggggtctgacctttgtaatatatatgtacttaaggtataagtaataagttatattataagttactttaactataagtacatttttttttttaacttttttattaaagttaaaaaaaatacttataatataagtacttataactataagtatacctt

SEQ ID NO: 35717 - DNA, 260 bp, Unknown
  Description of Unknown: RightRegion for integrase B9718 sequence
ggcaagattatcgagcttgaatttaccaatggccaaatacatagatttgaatactctctatgaacgacaaaagcaccggcagtccttgaccgtcggtgctttctggtatttattcatctttttgatgggaagcttcgagtgctgccagttctctatcccgttcatccttgggttgttgtactgagagatacatagcgtcccctatgtatggttagatatatcatatcaatacagcccagcccggtcattaataacaaaga

SEQ ID NO: 35718 - DNA, 260 bp, Unknown
  Description of Unknown: RightRegion for integrase B9719 sequence
atcgctcgcgctgtaattcaggagtgtacttgggacggagagcggctttttattacgctctaaacctcactattttataatggtggggttccacccgcatgataaaatagtgaaagtaaatttacggaggtgtctttatgaatgtgatctatcgtgtgcatggtgctggtggcttctatatggaaacgcagagccaggaccaggctttccgagctgccaggcaggaagctgcggtatccggccagatggctctggtatcc

SEQ ID NO: 35719 - DNA, 62 bp, Unknown
  Description of Unknown: RightRegion for integrase B9720 sequence
tcaaatgggtctattgaaacaatcacatttaaaaatggattatctcatacatttattcgata

SEQ ID NO: 35720 - DNA, 260 bp, Unknown
  Description of Unknown: RightRegion for integrase B9721 sequence
ggtgcttataaaaccacaggtcgacatgatgcggaaataaagtggagcatcattctaatgtaggcacaagaaataaaagttcttatgacaaacaaaaaaactcatatttaagctaaagggtaggaattctcctaccttttttgcttcatgtaagtgaaaatacagccttgatttcataacgtttcatagccatgactatgcaaccgacagtccaaactaatgggtcaccgtgtgtttccatatattttaaatcttcttca

SEQ ID NO: 35721 - DNA, 260 bp, Unknown
  Description of Unknown: RightRegion for integrase B9722 sequence
ggcctgactcattctgaatcatcactcaaggttatcaggttctgcatctctcgtgcagcataagggtacggaatgagaacggcgactgatgttcttgagcgtcttaggcaggttctggacggcctggaggatgaaatgccggagtgtggtttcatgctggtggggtcgatcccatacgatgaggggtctggtgtggtgttcgtcaccaatctggatgacgactcagtggagtccatagcagaagatatcctctgcgaaga

SEQ ID NO: 35722 - DNA, 260 bp, Unknown
  Description of Unknown: RightRegion for integrase B9723 sequence
gcaacaatgcggcgatataacaaaaaagcactcctaacggggtgttttttgttgcttatatagaacagcttagaacacaggattaatgttgcttgactttgtagctacactatgctacaataatgcaagatacagaaaggataaaacgatgaaaacctacaaagtcttgacctgccaaaaatgcaacgctcgtgtaaccattcgtggttggcgcgaaactcaacccgaacctatcgaatgccccaaatgcggaatcccct

SEQ ID NO: 35723 - DNA, 260 bp, Unknown
  Description of Unknown: RightRegion for integrase B9724 sequence
tccaatcggaactgcacaaccgaatggaggcggtcactcctaaaacataagaaagcgtcttaaaacgcaattggcgcagtttattgaccgttttgaggactctcttaatggtctttttcttgcgattatttaataactgaatactgataaacttcccgtaacaaaatcagcgataggatgtgaccccgaagccaaaactattgacattgtaaatcctgctgttccttgtgtcattggaaagcccaatgacattgtaggag

SEQ ID NO: 35724 - DNA, 260 bp, Unknown
  Description of Unknown: RightRegion for integrase B9725 sequence
ccgttgttggcggtacagcaatataaggtggtgtgcctggggcggtggcggcaagccgcataaaaccgggggtttccttttctgaccatcggtcttagtctgcaccaccttactttcatcaatggggggtggaatgaaacggggaattacgatggcgctggccgtcttgctcgccggatgcgcggcacaaccaaagccggtgttcatccggcttgacggtcaatcaattgcgggcaatccggtgctcgcacaacagtttg

SEQ ID NO: 35725 - DNA, 260 bp, Unknown
  Description of Unknown: RightRegion for integrase B9726 sequence
aacttatctttcaaagagagagaaaaatatagtgcagaacttgaaattgaatatcttgattaaagggtggcaccaatgggtgcccccttttttttattgttaaaatagaaggaattttgtcacaaatgtgtaataagtaagtatgaacatctgtacacttttttattcaagaaaattttataaaattctatgtataatacaagttgatcaggtatatcatatttaacacaaagtaaaatttcctgattatacggaaacaa

SEQ ID NO: 35726 - DNA, 260 bp, Unknown
  Description of Unknown: RightRegion for integrase B9727 sequence
aaggattcgaaggtcgttgaaatcgtgttcaagaacggtcttcggaatagatttgaatattgataaaaagaaaaagccgcgttttctgcggcttttcttcgtctcgtgttagatattcatctgacaccccatagttaccgtacacgcatataaagggcgtcccagttcttccgatttcttttttattatctcccgacatttcttgatgaaataatactgtctttcgggttctctttccggcggcgggaatgataggtcct

SEQ ID NO: 35727 - DNA, 260 bp, Unknown
  Description of Unknown: RightRegion for integrase B9728 sequence
acattagaagaaatgaaggagatttgcagcaggaacggctttgaagtccgatatagggaatgattgcagcagccgttaagggaacttgaacaatatgcctgcctttagaccaaattttactaaaatgggacagaatcattcagaccataataaggataattattattacttttgtcccataattcaaacgattaaactttaaattcagattatgatagagaataccaacttggagttaaagcccgttgaaattcgggaga

SEQ ID NO: 35728 - DNA, 99 bp, Unknown
  Description of Unknown: RightRegion for integrase B9729 sequence
gaaatgatcacaagccccgataacgtgatcattaatctaggaatttggaaaaaagcggcctgatcaacggacggcgacaccgcgctagcacacggtgtc

SEQ ID NO: 35729 - DNA, 260 bp, Unknown
  Description of Unknown: RightRegion for integrase B9730 sequence
aaggattcgaagatccaggaaatcgtcttcaagaacggtcttcgtaataggttcatatattaagccaaaaataaaaagccgctgttttagcggcttttctttgtctcgcgttagatattcatttgacaccccatagttaccgtacacgcatataaagggcgccccagttcttcagactttctttttacgatctcccggcatttcttgataaaataatattgtcgctgcggttcttcttccggcggtggaagtgtcagatc

SEQ ID NO: 35730 - DNA, 260 bp, Unknown
  Description of Unknown: RightRegion for integrase B9731 sequence
aaggattcgaagatccaggaaatcgtcttcaagaacggtcttcgtaatcggttcatatattaagccaaaaataaaaagccgctgttttagcggcttttctttgtctcgcgttagatattcatttgacaccccatagttaccgtacacgcatataaagggcgccccagttcttcagactttctttttacgatctcccgacatttcttgataaaataatattgtcgctgcggttcttcttccggcggcggaagcgtcagatc

SEQ ID NO: 35731 - DNA, 260 bp, Unknown
  Description of Unknown: RightRegion for integrase B9732 sequence
gacggcaccgttgaaacaatccgctttaagagcggtgtttccgtaaggatacatcgccgatgatgcaaaacacccccgggcgcttggctccgggggtgttttgcatagcaaaaggaaaaactattctgggttggtatgcataattatacagtcgtgatgtatagggtatttttattagcatcgggtagctaacttattggaagagcagtatatagtatactccatggcaacagttgttgtcaatcggtttttgacgaatc

SEQ ID NO: 35732 - DNA, 260 bp, Unknown
  Description of Unknown: RightRegion for integrase B9733 sequence
gtgggtgcgggggctcgcactggtcgggttctaactcctgttccctggtcgttcgcggcttgatcgcgttcctgccgccgaacgctgttcggcgctcgacgttcagtgctgttccgcgcgacaatggcgctaccatgaaagggcaggctatggctcccgactacaaaacgaccgaaggctggcgcgtcggtgatctggtctgcgggtcaagcggcgcgagccccggcgaccttcaccggattgttgagatcgaccacgcc

SEQ ID NO: 35733 - DNA, 62 bp, Unknown
  Description of Unknown: RightRegion for integrase B9734 sequence
acacaaacattacttgaatttgccaacaacatgggctataatagtatcgaattgggattgta

SEQ ID NO: 35734 - DNA, 260 bp, Unknown
  Description of Unknown: RightRegion for integrase B9735 sequence
gtaagagaaacggtggcatatatgcagctaccaataaaagtaagcagcaaaattatttcctgaaaactcaagcgttcacctccctcataatttggaggcgacaatcaagagcaaattatatcagaaggggagaggactgtaaaaataagctctccaagtccttaatggcggtttgttggtacaataccaatgaaccgcttttttcatgcaaaaattccggaagccccaaaaggcaaccgtttattatagattgtagaata

SEQ ID NO: 35735 - DNA, 260 bp, Unknown
  Description of Unknown: RightRegion for integrase B9736 sequence
gttggcgtcatagcctggcgatacaggctcacaaaatcggacagacaggatcctgacgaataacagccagcctccgggataaaacccggaggccttttcattcagttttcatcctcaggcggtttttctttgttgtagttcgccgtactgattccaagcagagcgcccaggaacgcgtccaccgccgtgatcgttccgactatctccgccgcgtacgggaaaccccagattttcgccagcgcgaaatacagcgttcccac

SEQ ID NO: 35736 - DNA, 260 bp, Unknown
  Description of Unknown: RightRegion for integrase B9737 sequence
atccatgcgggttccctaatcgctgaaaaaccggaccgcatcttcatcccgctaaacctctgaaaagacgggaaggagaccggctgtgtcaaaaacggaagaggcgacgaagttcgattcattcgtccgcgagttcggtgtggaggaactcgcgcggcggcttggcgtcaacccgtctgcgatctaccactggctccgcggggcaacgtctccccatccgtcgaacgcgatccgtatccaggcgctggcgaagcagcgcg

SEQ ID NO: 35737 - DNA, 260 bp, Unknown
  Description of Unknown: RightRegion for integrase B9738 sequence
gcctctctcgccaagacgcaccagaacgcgtcccaatccggagtgacgccaggcgaggagtagaaggtctcgatcaggcgcccggacttatccccgtcggtgggtccgggcgcttcgtcgtaggtcagctcgtccatcgccctctgccttcgtcgcggtctgcgacgttcccctgggggcggggcgattcgttgtccatcctgcactgcgtcggcgcgtcaaaaaaagcgttctgagctgtgggtttgatgggttgacat

SEQ ID NO: 35738 - DNA, 260 bp, Unknown
  Description of Unknown: RightRegion for integrase B9739 sequence
ggagcgatggagatcacccgggaatgggggcccggttggcgggatcgggcaattggcccttgacaggtgacgcaacatctgttacgctgtaggcagagaagcgaagaacgggccgatcagctgcagtgaacagcggaccggccctgagcctcagcgctgaggaaccagcaccaaggcctgccctattctagcccggactgccgcaggcggcgacctcagcaagaggcgccgccttttcgctatcctggggaggatgccat

SEQ ID NO: 35739 - DNA, 260 bp, Unknown
  Description of Unknown: RightRegion for integrase B9740 sequence
ggtgaaaaggaagtcttcgattcaatcaagcaacttcgcaagatccagaaaaaggccgcttagactttacgcctgcgaccttgaagaccctcctccgggggggggtcttttttgtttaccgcaaatcctgcgaaggttccactcctgccaatgcctcgagccgcaagatctccttctcgaggatgatgatcctctgatgatccttatccgagatggttgagacctgcgacttaatgtcctgccgaatgtcatccaccatt

SEQ ID NO: 35740 - DNA, 260 bp, Unknown
  Description of Unknown: RightRegion for integrase B9741 sequence
cccattgaaattcaacggacttacgtagacggccgcagcgccggcaagcggtggtccgcatgagcgacgctacggactttaccaatctggtcgagcagcatcgtgcgcaggcgttgagtgttgcaaacgcagtccttcaccattccgacctggcgcatgacgtcgtggcggatgcactgttgctggcctggatacacagaactcaattccgcggcgatggaccgttcgtggggtggttcatgcgcattgtaaagaatcgc

SEQ ID NO: 35741 - DNA, 131 bp, Unknown
  Description of Unknown: RightRegion for integrase B9742 sequence
gggagtaaatggtgccggaaagactactcttatgaaggctatagcaggaatattaagaactaattctggtgaaatcctaatcaataaagaaaaagcttatgaaaatgtaaagattaaaaatgaggttatat

SEQ ID NO: 35742 - DNA, 260 bp, Unknown
  Description of Unknown: RightRegion for integrase B9743 sequence
cctgtttttgctatggagttttttggcgcgcgaaaaatgggtcgtacggccccgcacccatagagccaatgtggactcgccacatgccagctcgcgcaaaagcccgccagatgggttccggcgggcgtggtggcgaggaggacaatcacggcgagcaggggcatgggccgctcacgtcgcgatctcgaacatttcctcgaccgcctggtcggcggtgatctcgccccgcttgtgggcctccaggatcggcttgacgtcct

SEQ ID NO: 35743 - DNA, 260 bp, Unknown
  Description of Unknown: RightRegion for integrase B9744 sequence
ggcgtgtcggcacgaaacaaaagcccggcgcgaggggcatcccgcaccgggcctgaggtttgacacgatctgaagggcaaagtcccctcaccctttgcttcaatccagccgctcgacccgcacgaaaccgagcccgccgatgccgagcgcatcggcgccggcgcggccgaggtcgacgcagcggccggctatgaacgggccgagatcagtcgacagcgccacaatggcggcgccggttttcaggttggtaatgcggaagc

SEQ ID NO: 35744 - DNA, 260 bp, Unknown
  Description of Unknown: RightRegion for integrase B9745 sequence
aatattacgaaaagcgaagaatgtcaagaaatcattgacaatcttcttcaacttgttgcatagaaaaatgagcagtacaaaaaatgtcctgctcaaaatatccgaaaaacgaacggatttatcttttccccttccctacgacgcaaacatttcttgttcttctttgcgtcgctgaactaatcctgctactactttcttttgattattaaaaacccaacaacctttgtatttttcttctggtgtttttgcgttcggattct

SEQ ID NO: 35745 - DNA, 260 bp, Unknown
  Description of Unknown: RightRegion for integrase B9746 sequence
cgcgtacccttgcccatcgactgggccacccaacgccagttgctcggattcatccccgcctgattcaccaccgatatcggcagcaagactggctatcggtactgccgccctagcgctctgagaatggcgacgcaaaacgcctgaaaactcaggctaacggtactgctgagaatgcgtaaacgacaaagccccaccagtggcggggctttgttcgaactaggcgccgtttgaccggtacgctagtaatgctggcggagagg

SEQ ID NO: 35746 - DNA, 62 bp, Unknown
  Description of Unknown: RightRegion for integrase B9747 sequence
acagtgtacagcaaagacgatatccgggtgaccttcaaggacgggacggaaatcagagcata

SEQ ID NO: 35747 - DNA, 260 bp, Unknown
  Description of Unknown: RightRegion for integrase B9748 sequence
ctctatagacgcagtattgaattcgaatttacgatcgcaacaaaaaaatcccactctgtgtgagtgggatctgttttaactccgctcataatgctatatttccattcaaaacatattggtcattggtggcccatgtcattggaatggtggtggaaagcgagttgtgtgcaaggtatgttccagatgcattcaaggctttgacgtacacatttcgccctgcgtcgtaaaccaatgcgccgtgataaattgctggggctgat

SEQ ID NO: 35748 - DNA, 60 bp, Unknown
  Description of Unknown: RightRegion for integrase B9749 sequence
cttaacggcgagcagggaggggagtttataaactcgcataaaagactaaaccatattcaa

SEQ ID NO: 35749 - DNA, 260 bp, Unknown
  Description of Unknown: RightRegion for integrase B9750 sequence
ctgcgcatcgggcgggatggacaattgatcttggccgaaagtctggagcagccaacatcatgacccacaccagcgactatctgaaagatatagacaaccgccactgtcaggactgccaggcttggggcgggtggttacctatccaagtgggtgatcagatcagctacacaacccatggccggtgcaagcaccccaaatatgtacctgtcatcgcccgcccggcgcttggttgctgtttgtgggcgccgatgaccatggcc

SEQ ID NO: 35750 - DNA, 260 bp, Unknown
  Description of Unknown: RightRegion for integrase B9751 sequence
gaaaaagaatacacttttaaacagttgcaggaaagtttcaatctggaagaatggaaaatatgaagaaagtctgtattttgctgacttttcttttattttgcagtataactaataatgaatgcaccatgccagaagaaaaactatatcagatagaggaacttccagatttgaaaattaattggactgaaagctacaaatgcctaaatgagccactattagaatatgtgtgggaagtagccaaccacttcctacccagttgc

SEQ ID NO: 35751 - DNA, 61 bp, Unknown
  Description of Unknown: RightRegion for integrase B9752 sequence
agggacagaggttcggatttttcttgtttgcagttggtattgtcgcggaatgaattcaaaa

SEQ ID NO: 35752 - DNA, 260 bp, Unknown
  Description of Unknown: RightRegion for integrase B9753 sequence
gctggtcgggaggcggattttgccgcagaactgagtcgctgcgcagggcttgaaattacctagagggctaggttgcgctagccagccaaggcggcgtatcttttcctacaaaacagaatgcgtaaatgactgatcaagacgctgacagatacccttctccccagtcacggcaacgctttgcgcagacaatcctcatctggcgcaccaaggctggttgggctcacgacaccatggaccgctggggcgaggcagcaggcttt

SEQ ID NO: 35753 - DNA, 260 bp, Unknown
  Description of Unknown: RightRegion for integrase B9754 sequence
acttataaaaaggaacggtttaaagttgtttttcaagttgaaggaatttccgataaaggttgatgtagtaagggttatagagtttgaattaaaaatgtaaaaaataaggataatatattctcgaattaacgagtttatattatccttaaaactgtaactttaaattatcatattagaaactataaataactatttatcttttcattatcacattctaataatccaaataactttaaagtttctgtttctaaatcttttcc

SEQ ID NO: 35754 - DNA, 260 bp, Unknown
  Description of Unknown: RightRegion for integrase B9755 sequence
acagacgaaatgcgagaaactgcccggaagaaagccttagaaaggagcagcgccaatggctaagaatgtaaaggtaatccaggcaacctcgcctattttgtcagcacagtcgcaaatatccgtaaaaaagagaagggtagctgcgtatgcccgtgtttcgaccgaaaaggacgaacagcagaacagctacgaagcccagattgaatactacacccggtacatcaaaagcaatcccgaatggatttttgcaggaatctatt

SEQ ID NO: 35755 - DNA, 260 bp, Unknown
  Description of Unknown: RightRegion for integrase B9756 sequence
aacaagcactaccgaaaaaaagagccgaggaacggagaatccctcggcaccgtcgctgtatgatgtgagacgcggcggctctataatatatctccgccgccgtttttgtcaagatgctttcgcggtctcccgccgtgcttcccgttctctcggctggcggctcggctggcatccgacgccgttctggtgcgatgctcggcgagccagtccgcgtactccctgcggctttcctcggtgttcctgccgccgttcagccatgc

SEQ ID NO: 35756 - DNA, 260 bp, Unknown
  Description of Unknown: RightRegion for integrase B9757 sequence
tccgaaccctacattgtatggggaaagatattcgttcaaacaaaaaggcatcctttaccatgacggtagagggtgtctttcttcattctccggtaaaaccgttttcccgggcgcatttcagcgcacccaaaatcatcttatcctgagccaaagtccgctgcttgatctcgtaaaggggtgtcccccggtgcctgtcccattccatgagctgcttccggtcatggactaccacaccctcatagagatttatcagcttgtcc

SEQ ID NO: 35757 - DNA, 260 bp, Unknown
  Description of Unknown: RightRegion for integrase B9758 sequence
cagcaaactcgaacttgcttttgtatgagagcgggttcgggtttgttttttgtttggacatgattttaaagtagagcaaacaggccgcacaggagagatatcttctgcgcggcttgcttgctctctatggaatttgaatgcattccaaaaactgctcgaaagacatctcccctacctggtatttgaccattgccttctgcgcggtatcacgccatttgttgtagtcctcgcgcattttggcgttcccctgtgcgcgggcg

SEQ ID NO: 35758 - DNA, 62 bp, Unknown
  Description of Unknown: RightRegion for integrase B9759 sequence
ctcaattatttgctaaagaacgataaaaatgtgcttttcagcagcattctgctgccgtcatg

SEQ ID NO: 35759 - DNA, 260 bp, Unknown
  Description of Unknown: RightRegion for integrase B9760 sequence
ggtgttattcggcccggcccctattcggaggacaaggcggtattcgtaccagcttgggactgacgcacggcaatggcggcggctatgtcccagaaacgatcccagcactcagcttcggtgggtcggcgtcctgcgtattccatgttgattacttcgacttgctacgggctgtgcatctaacctacgaacgctgtctacgactttggagaccctcatggcagacatcaaccccctcaccgcccaggtgctgatcaagaagc

SEQ ID NO: 35760 - DNA, 260 bp, Unknown
  Description of Unknown: RightRegion for integrase B9761 sequence
ggtcgccagccggacggtacctacttcgacaaaagccgggtcgtcatccggtggcacgtctaagatcttcctgggctgttaaacgaaccgctctccgcgacatagatcggagggccgttcggccgttcgggtggccggtcgaactgacggtcatgtagcgttcgtggagtcagagccgattcgcttggcgacgttctctgttcggttggttgggctgggtcaagaaggcgcgtttcccccgcgaggggggacgcgccttc

SEQ ID NO: 35761 - DNA, 260 bp, Unknown
  Description of Unknown: RightRegion for integrase B9762 sequence
ggacgcgtggcttcgatagagtttaagaatggactcgttcacgagttcctttacagagaataagagcaggctgaggaggcagcctgctctctttatgtgtgtatgagtaagattagattaacaagaaaggttgattttacaaggttttaggcatcttgtttttagagttcatctgacaccaaaactgccaccaaggcaccatccaacagcaactctgtgtaccatggtgcagactgcatggcatataaatttggataggt

SEQ ID NO: 35762 - DNA, 76 bp, Unknown
  Description of Unknown: RightRegion for integrase B9763 sequence
tttgatagagttggcgtggactttttttattattatactgggatttaccctaaatatgggtaaaaacgccactttc

SEQ ID NO: 35763 - DNA, 260 bp, Unknown
  Description of Unknown: RightRegion for integrase B9764 sequence
ctggtggtagcgggggcgcgctttggccagcgtttgcataggccaataaaactggccgggtagttattccttatatatgtatatcaggcagtcaataaaccaaccgcattggccaacctgcccgccatatattgaccccaaccagcacaaaccaacccaccggcaaggtgtggcaatatattgctgtggccgggggcgtcaataaaaggcgtgtagcctattgtgtttatattggtaacacggcgatcggtgccgataaa

SEQ ID NO: 35764 - DNA, 260 bp, Unknown
  Description of Unknown: RightRegion for integrase B9765 sequence
ccagcgggatttgacacagtcaggaacgctctaggcccgctacaagtgccgctcgcggcgtgatctgagcgagcgtcctacagcgccccacgcgccgcgcccggccgtccaagccgaaggcgcggcgacgggccgtcccgcggcagtcccgcccgtgtcccgggcgtggggcgccgtggtagcctttcccgaagccatgccgatcaacaacgcgtattcgcagtccgtccacgaaagcttgtcgtctgggtacgcgacgc

SEQ ID NO: 35765 - DNA, 260 bp, Unknown
  Description of Unknown: RightRegion for integrase B9766 sequence
cgccctcataccagcggccggttccagccggtgatcatcccgttccgctcggtggccgcgtagaacacaaaaaaaagccccgccacccggcgaaccggacagcggggcatgtagccacgcggtggggggatgtgaagtgatgacttgggccaggcgcatgaccaacgaagaacttcgatcggaggagtacgacttaaaacagcatattgattctggcgagcgcgacggcatcgcagcaagccgatgggcggtcgataggt

SEQ ID NO: 35766 - DNA, 260 bp, Unknown
  Description of Unknown: RightRegion for integrase B9767 sequence
cattaccagcaaactcgaacttggtcttgtatgagagcgggttcgggtttgttttttgtctgaacatgattttaaagtagagcaagcaggccgcacaggagagatatcttctgcgcggtctgtttgctttctatggaatttgaatgcattccgcaaactgctcgaaggacatctcccctacctggtatttgaccattgccttctgcgcggtatcacgccatttgttgtagtcctcgcgcattttggcgttcccctgtgcg

SEQ ID NO: 35767 - DNA, 260 bp, Unknown
  Description of Unknown: RightRegion for integrase B9768 sequence
ggcgtgccggttattctactcgaaaacggaataggtttcctggtttccttaaaggcggcataaggccaacaaaaaaaggccccgatccaagaagctttcgcttcccagatcggggatttgttacggcatccttgcgcatcgtgcggaatagtcgatgtagcctttcggcaatccttcaatcacgtaatattcgccgtcgaattcgaatgcggacattcccgtttgccttgcctgttctatctgttgccgcgtatgcaaca

SEQ ID NO: 35768 - DNA, 260 bp, Unknown
  Description of Unknown: RightRegion for integrase B9769 sequence
tctctacgcaccgctaacctgcctatcgactgggacgaccagatcgccctgttcggaatgtgatggatctcagtctttcacgaccccagcggcgcttcggcgccgctttgcgttcagagccaacaaaggcaaccgatggctgcccactccgtactgcgaaaaatgggcgacggagaaaaagccgccagagcgaccaaatgttgctccagattcgctctccgcagaccgggttgcctccccgaacggcgcggaaccgcgcg

SEQ ID NO: 35769 - DNA, 260 bp, Unknown
  Description of Unknown: RightRegion for integrase B9770 sequence
ccgaacacaattaccgttgtgggaatggttttcatccaaaccagaagacacgccctgccttgattggtagggcgtgtttctttattttttatacatcccctgcaccactccgacgttctccgcccgctcaatatcccgcttgtgcagatactcatagacggccatcatggccgcaggcggctcacccttttgcttgcggtattcctcgatgtgggaaacaacggccttgtgcagggcgttcatgtggttcatttcctccc

SEQ ID NO: 35770 - DNA, 59 bp, Unknown
  Description of Unknown: RightRegion for integrase B9771 sequence
actctttggtgtggacggaaacagtgcgaacctgatggaacaggtaaagcggggaaaag

SEQ ID NO: 35771 - DNA, 260 bp, Unknown
  Description of Unknown: RightRegion for integrase B9772 sequence
tccgaaccctacattgtgtggggaacggtgttcgttcaaaccaaaagacactccttaccttaatcggtagggagtgtcttcttttattcttcgccggaatacccgttcgctctggcgcatttcagcgcacccaagatcatcttgtcctgagccagtgttcgttctttcagctcatagagtggagtacgacgatgatcgtcccattcaatgagttgctttttgtcatgaacgacttgaccctcatagagattgataacctt

SEQ ID NO: 35772 - DNA, 260 bp, Unknown
  Description of Unknown: RightRegion for integrase B9773 sequence
ctcgtaacgttagaaatcaccatcccgatcctccgcaagcaatctgtccgcttaacctcctagcagaatatagtggatgcttcgagtgccgcccatacgattttcaatgtaaatttttccatctgtataagcggaaatattgagtttgccatcagttccggttgtgccagtaagaacacctgtgtaggtcaataagtttgcaccgccagcaagtttagtcattctattaacggttggggaaacacgatatgctagcaagc

SEQ ID NO: 35773 - DNA, 260 bp, Unknown
  Description of Unknown: RightRegion for integrase B9774 sequence
agtaaagacatgcttttcagtatgtctttttattttataccggcgtccccattgaggggatgacacttcaatcacaaagagactgcattatctcaacagtctctattctctaatctccagttctctgctcttttctcacgcatccaaatgatacgtatgatatgaattctggcagggattgccccacgcaatgtgcatctcgcgggcggtcaggtcgatcaccatcgcggtaatggtgctctcgcgatccattgggttaa

SEQ ID NO: 35774 - DNA, 260 bp, Unknown
  Description of Unknown: RightRegion for integrase B9775 sequence
agacacagctttaccgctccttttactgccgtcattcgctcctataaaagaaaacgcccctgatggggcgctttctttaagtatcaaataatcctgcgcgcatactaccaccatccttcaattgtttcaaaatgtaagtctgctttttctccatcatgaaggattagtgctactcctgcaccaccaccataaatttgttctgttccgttgggatctagcgtgacatcatgactgccactgccgcaattgatcactttgta

SEQ ID NO: 35775 - DNA, 260 bp, Unknown
  Description of Unknown: RightRegion for integrase B9776 sequence
tccgaaccctacatcatgtggggaacggtgttcgttcaaaccaaaagacactccttaccttaatcggtagggagtgtcttcttttattcttcgccggaatacccgttcgctctggcgcatttcagcgcacccaaaatcatcttgtcctgagccagtgttcgttctttcagctcatagagtggagtgcggcgatgatcgtcccattcaatgagctgctttttatcatgaacgacttgaccctcatagagattgataacctt

SEQ ID NO: 35776 - DNA, 260 bp, Unknown
  Description of Unknown: RightRegion for integrase B9777 sequence
tacgaagaccggtttaatgtaacttttaaatccggtattagtgtaaatgttaatagaatataattgattgaaatattataataccggctcggggaagtgtttttctctaggccggtattatatttaaaaacaaagctactatttttgtattttattatacgacttttattaataacgttgcgagttctttactctttattgaaaatgaaaaggttatttcgtggaaaagtatgctataagaatagagtaaaagggtatat

SEQ ID NO: 35777 - DNA, 260 bp, Unknown
  Description of Unknown: RightRegion for integrase B9778 sequence
cggaagaaccacgtgagaccggagtccatcaagatggagtggatcgtgccggacacacgatagagtgaccccggccacccctgcgaatcggggaaagttcgaaaccgacgcgagtaggtgcgaaacagggacatctgaatacgaacaacgcgcgaacgccgcccgtctgacgctgtcagatgggcggctttcgtctgtttggcagggcagacatccacgcccttaaataccgccccatgcacccgctgcactactcaccg

SEQ ID NO: 35778 - DNA, 62 bp, Unknown
  Description of Unknown: RightRegion for integrase B9779 sequence
gcgaccaacaaaagtcttctacctcctccactggtctcgtttcagggggtcacgtcagtttg

SEQ ID NO: 35779 - DNA, 260 bp, Unknown
  Description of Unknown: RightRegion for integrase B9780 sequence
ttcgaaccctacatcgtgtggggaacggtgttcgttcaaaccaaaagacactccttaccttaatcggtagggagtgtcttcttttattcttcgccggaatacccgtttgctctggcacatttcagcgcacccaagatcatcttgtcttgagccagagttcgttcttttagctcatagagtggagtgcggcgatgatcgtcccattcaatgagctgctttttgtcatgaacgacttgaccttcatagagattgataacctt

SEQ ID NO: 35780 - DNA, 260 bp, Unknown
  Description of Unknown: RightRegion for integrase B9781 sequence
cacctgctcgttgcgttagaattttcaatccccatcatccgcaagcaaagcaaccggcgctaaaacgccggtttctatcttttacggccaaatctgcccacaattcctattcatcaccgattggcggtttttccgcctcgtcgtccaaaagcatccaatcaaggtcgatcaaaatagagggaggaatcctgtatttgtcttgcggatactttgggtccggggcaaaatcaaaaagtgacagagggatcggttggacattc

SEQ ID NO: 35781 - DNA, 260 bp, Unknown
  Description of Unknown: RightRegion for integrase B9782 sequence
gacgctttcgctaccgctccggggctcccccggggcgggttatacatccccctcgccgcctagaaccatgtcccgcctccgcatcatcgccctcgaagccgagggcaccgacgacgacgtgaacgccgccctccgcggcctcgtggacggcctcaccggccccacccgcgtcacgctcaacagcccttacggctacctccgggcacccggcgggggccgcatcccgaacggcaccgggggcgacgtggagggggcgttcg

SEQ ID NO: 35782 - DNA, 260 bp, Unknown
  Description of Unknown: RightRegion for integrase B9783 sequence
agcagactgtcatttgttttgcgatgcggattgaaattaagggaggcgattgcatggaattaaggacaatactatatggatataacaaatatcagtttgcttattcggtcaacgaggaagaggcaaaaatcgtgaggcggatttttaaggagtatatcaacggtaagacacttcttcaaattgcaaattcacttacccaagaaaaagtcgtctactatagggacagaacgacatggtccaagcaggccgttcgaagagtc

SEQ ID NO: 35783 - DNA, 260 bp, Unknown
  Description of Unknown: RightRegion for integrase B9784 sequence
acacccactatacggttgtatgggcgggtgttcttgctttccttctttttcgaggaacagtaagggccgagacactaacagcttcgcgatatgtcggatgaatggcagatcgcgtagttgttgtgcaataaacacagacaggaaaaggcatctgcccagggaaccgccctgtggtagatgcctttttgtcgtacacggaatcttaatatcgtgtttcgctattatgtagcaaaatcaagcgaagtaatcgtcgcatgtgc

SEQ ID NO: 35784 - DNA, 260 bp, Unknown
  Description of Unknown: RightRegion for integrase B9785 sequence
aaagatatcaaaaatggttttggcaaattcgatggacctgtacctttacccaaggcattttgagccaattttccgaggatttttcgggaaagcggctcttttttgtcctcggcaaagtgtagaattctgactggcgtttttgttggttctgccgaatgcgcactccaagcacagatgccagcgcgttagccggctgtgcggcatttcagacgttaaaaccgcaggcaagccccatcccactccaggacgaaaacacggcg

SEQ ID NO: 35785 - DNA, 61 bp, Unknown
  Description of Unknown: RightRegion for integrase B9786 sequence
gcgaatccgaacacaatcaccgttttcggaatggtttttgtccaaaccagaaaacatgccc

SEQ ID NO: 35786 - DNA, 260 bp, Unknown
  Description of Unknown: RightRegion for integrase B9787 sequence
atagtctcacccgacgattttgaacttgttgtattccctgccctccccaccgaaaaactttaaaatcggtatttttgcaatattatcctgcgatttttgatctttttgttcatttttcgtttgtattttattttttttgttaaaaaaaccgtaaaaactattgcaattcgcaaagcctgtgtgttatactcgccttgttatcgtcactattgagggcatcggtcaacttatagatatcatgcgtgtgcagaagagcttgc

SEQ ID NO: 35787 - DNA, 260 bp, Unknown
  Description of Unknown: RightRegion for integrase B9788 sequence
aaagtcgagtctgtagttttcaaaaactcgcttacattgcatttcatatataaagccccttgacgcgctcaaaggggctttattttaatcctaagccttcgctcggtaaaatattcgtctttcgttactcaggccgtaaaaacgccgtttttcgcgcctcacagcgattttgtcatacattttggaacacgtggcttcccacgaattccaataacgtgtaaattcacggtctattcccgtcgaatttcgtctgcaacctt

SEQ ID NO: 35788 - DNA, 260 bp, Unknown; identical to SEQ ID NO: 35720
  Description of Unknown: RightRegion for integrase B9789 sequence

SEQ ID NO: 35789 - DNA, 260 bp, Unknown
  Description of Unknown: RightRegion for integrase B9790 sequence
gtacacaataccaacctcaccctccgctggtcggccgactccgcgctcgcccgcgtcggctgaccacctccgcctcatcggcccgcggcggcgccagcaacagggcccagagctgccgccacgccacccgccgctccgccagggacgccttcgtcccagcggtcagggcccgtcgaagcgggggctcggggggcgcagtgtcccgccctcgctgctgctcatccataccgaccagcgtaccggccacgagcggaaagaaa

SEQ ID NO: 35790 - DNA, 260 bp, Unknown
  Description of Unknown: RightRegion for integrase B9791 sequence
actaaggtaacttcactttggaaggatgataccactgtccaaacttttactgtggagatttaatttataatggtgtgatattgtataaatttaaatatattacaaaaatttaaatagtaaatgatatgtttattattttagaacctaaatatttaaaatttttaataaatattttatgattaatagtatactttttcaatatatttgatataatgttattagaatgattaaatcaataaaatcaatatattgataaatag

SEQ ID NO: 35791 - DNA, 260 bp, Unknown
  Description of Unknown: RightRegion for integrase B9792 sequence
gaactccaactggacggtaagctgaccgtggtattcctcggcggcattcggataacgatttaaaactatcaaaatgcatactcacaggacggaatcgagagatttcgtcctgttgtcatctatgcacattagtcaattagtattgactaatgtactaatccaagctataataatagctaacgaattatccgatgggaggaacataaaatggctgaacgcgtaacctttagcattgatgcggatatatacgacaaattttg

SEQ ID NO: 35792 - DNA, 260 bp, Unknown
  Description of Unknown: RightRegion for integrase B9793 sequence
ttccagttggttgcgggggcgcgcagccgtctttgcagtgcattgacgaccgttcgcgtctgaacctagcagcggcgcatgccgccacctgatccgtcaacgatcgtttactgcctggcctgccggcgaccggtgaatggcaagggctggttcggtccgggctgtcaatgtggtcgaccggcggcagacgcgctcaaaggcgcgcacagtgccggaacgcgaccgccgaagctctagccgaaatagccctcgatatcgct

SEQ ID NO: 35793 - DNA, 260 bp, Unknown
  Description of Unknown: RightRegion for integrase B9794 sequence
ctaaaaacaggcggcaattggacttcaccgccgattgagttagatgtgaaattgaaggtgtaaatttttttgcgccttcaattccatcatcaatgcgcaggttcattcgcgcataagtgatggatataaaagaaacgccttgatgtatcagctttttcaccactttgaaaagataaaaaagaagggcaggatttattcctgctctttttgtatgccatattccttttccatttcatccatgaaagcatcaaaatctgtca

SEQ ID NO: 35794 - DNA, 260 bp, Unknown
  Description of Unknown: RightRegion for integrase B9795 sequence
aatgaaggcttgcgaattgaacaagcactcagtgctccgactttgagtttcgttgccagttgagaaaagtgtaaacgaaattcaaaatcgagaggaggaattcaactcactttgttgaattcgaaatgtgaaaacgaaagtgcagcctttcatttacaaaggattgggcttcacttcctatatatacaagatatagtgaaccgacttttgaacgtctacaacgggtggtatagggcgaaacttgggataccttggtagcg

SEQ ID NO: 35795 - DNA, 260 bp, Unknown
  Description of Unknown: RightRegion for integrase B9796 sequence
tttttattttgtaggagaaatgcaagaacttttattgtaagagaaacggtggcatatatgtagctgccaataaaagtaagcagcaaaattatttcctgaaaactcaagcgttcacctccctcgtaatttggaggcgacaatcaagagtaaattatatcagaaggggagaggactgtcaaaataagctctccaattcctcaatggcggtttgttggtacaataccgaggtatgaaacgactgcaatatgttttccgcccga

SEQ ID NO: 35796 - DNA, 260 bp, Unknown
  Description of Unknown: RightRegion for integrase B9797 sequence
gtagggttgggtgcgggagcctacaccgggcgctacagtgcgacggttcggctggtggcctgaggtgagtcgccacgtgaaacattccggtttcacggccccgcctatttcaccgtcccgcccggctttagcgccctgatctgcgccagcaatttctccaagggcggccgcgtcccgagacgcgctttgagcggggccagctccactttcagcacgccgcgacgccggcaatagcgacaccggagccgggccaacgtctc

SEQ ID NO: 35797 - DNA, 260 bp, Unknown
  Description of Unknown: RightRegion for integrase B9798 sequence
ctcatctgcttcaaggatgggacagagatcacccaggctatgcaaaggaggatatctgcatgatctatatcactggtgacacccacggcggtttccagcggttcggaagcaaatacttccctcagcaaacgcagatgggccgaaatgactacatgatcatctgtggtgattttggagggttgtgggacggcggccagaaagaccagcattggctggactggctggctgagaaacccttcaccaccttgtttgtggatgga

SEQ ID NO: 35798 - DNA, 260 bp, Unknown
  Description of Unknown: RightRegion for integrase B9799 sequence
ttttacccgccggaaggagatgaagaggtcgttcatagatttgtctacaaagataacccctgatttgcaggggtttttatatcgtgcacactaaggcttacggacaaccgtaagtgctagtatgatacttcatatttatgctcacctcagttatattctatataaataaaacggcctcctggctaaagaaagcggggttagcttccccaggaggccgtgagccgcatactttaattataagccataaggccctccccgtc

SEQ ID NO: 35799 - DNA, 260 bp, Unknown
  Description of Unknown: RightRegion for integrase B9800 sequence
gaccgaccgcaccgtgttcgtgtgcccgctcccgcttcggttcctggcgagggaactggatgaggttgccagcctggcgctcgggcgggcgaaccttgccgcccaccatccaggtggcgaggatctccatcgcgttgttcgacagctcggcgcgggcgtcctcgaattcgtcttccatggcctgccgttcggccttgaggcgccgcgtgtcggcggcccggtcggcggcaaggtctcggtagaggcgggcctgctcgttc

SEQ ID NO: 35800 - DNA, 61 bp, Unknown
  Description of Unknown: RightRegion for integrase B9801 sequence
agaattgttcacaagttttatggtacaatttatgcgaataaagaaaacggaaaattagaat

SEQ ID NO: 35801 - DNA, 260 bp, Unknown
  Description of Unknown: RightRegion for integrase B9802 sequence
accaaaagtcctcgaaatcgtctgatttcgatgacttttgcttttcataagttccgtttttagtgtgccgcttttttctgacccaaacgctgaccccaacgggagctaaactgtacccaagaaaatggacacgagattttgacccatggccccgttcggcggacacgcatttgacccatagggtcagaagcgccgcacctgtgttatgatagaactaccgaacggaggtactgtatgggcacgaagaagaaattcacacc

SEQ ID NO: 35802 - DNA, 260 bp, Unknown
  Description of Unknown: RightRegion for integrase B9803 sequence
gccgccgtggccccgttccactggttccccgggggccggggcttcaagcggccggcggtctgattttgtgttaaggcaaactctggccccataatttgcctaaacgcaaaattgacaggtgcatgacaaatgcttgacagccccccggctttgtgatatactatcaccggcgacgaggcgatatttttttatcgcaatggtggacaattgtccaccggcccgcccgggccgatggacaggggcaagggagcagggagggg

SEQ ID NO: 35803 - DNA, 256 bp, Unknown
  Description of Unknown: RightRegion for integrase B9804 sequence
aaattaataacacaatctgaaaacggatattataaaattatagaattaatgaatgaagactaatattattgtgaataaaaatatggaataaggataatatgattaataataaaagcaagcattgttttaccatgatggtgtacctataaagaattctgtatggagagccaggatgtggtaaaacaatgcttgcaaaagcattaataacaattttgccagatttatctcaggaagagttaattgaaattgcaaagat

SEQ ID NO: 35804 - DNA, 260 bp, Unknown
  Description of Unknown: RightRegion for integrase B9805 sequence
gctgggggcggctacaatcacgcacccccagccgttccggttctgatccggctgggtgcataaggtcccggttgcgacgtttacgattttaaacgaacggccattgaccgggggcaacctcgacagcatgttccggcctgttacggccgctttgggccgctttcggccgctaccggtcgttcagtttgaaaggaggcgacgatggacaattatcatagattgcttcgcagccttcgtgtcgtcgctggattttccctggt

SEQ ID NO: 35805 - DNA, 60 bp, Unknown
  Description of Unknown: RightRegion for integrase B9806 sequence
gctgttaccagcaccgaacagggttcgcctgagcgtcaacaatggcggagaggcagggat

SEQ ID NO: 35806 - DNA, 260 bp, Unknown
  Description of Unknown: RightRegion for integrase B9807 sequence
gtagctgggggcggcaaccgacatacacccagcccaagaatgccggtagatatcgccgcgtagcggcagcgcgcacggcgtgcgcgacactgaatcgaaaatggccgcgagggaagcggttgagggcgccgctacacgcgcctatgttcccgccttgttcaggtcggacctatgccccgcgatcccaacgcccttcacgtctcgatcagtccggagatcgaccacgttccgttcggcgactatgaggggctgctgtggac

SEQ ID NO: 35807 - DNA, 260 bp, Unknown
  Description of Unknown: RightRegion for integrase B9808 sequence
agtcgtaaagtttttggcatatcggtgccacatatactttgcattaagaacattaagcgataagaaaatgagatctccggttgtggggatctcattttctttatgttttagatagacattgttatgaaccgaacacgaagccgagaactgcggctgtttttgctccgacaattccatcaatcgcgaggccgttgtcgttctggaatttcctgaccgcaagttctgtcagcgagccccagataccatcgacttcaagcttg

SEQ ID NO: 35808 - DNA, 260 bp, Unknown
  Description of Unknown: RightRegion for integrase B9809 sequence
gaattttgtcaaaatgttagctacatagatcaggctaaatttgatcagattttagctctttagctgttttaatttttcaataatttgatcagctttttgaactctagttttagagtcgttggtttttattatcattacagcctcaaaaactaaatctgtcagatcatcaatccttttatttaagctctcaatttgctcatcttttaaggcaatcttattgtctcgatctttaatttctgtattcttgtctgctaaaattt

SEQ ID NO: 35809 - DNA, 260 bp, Unknown
  Description of Unknown: RightRegion for integrase B9810 sequence
acttacaccttcgagttctgtgtcaaaatcaaacaaaagagccgctcttcagcggctctttaattacacctgacctcactttaatgcaaatccggatgagcctgccatagtttttcaagcttctgctgatcggtaaccacaacgccgctgaaactgtacgtgcaaacatgatagattttcttgagcgggtcgccgtacagctcctcaaaccgcacaagctgaccgttccttgggtcaatgatgatataggaaccgccctc

SEQ ID NO: 35810 - DNA, 260 bp, Unknown
  Description of Unknown: RightRegion for integrase B9811 sequence
agacacagtctgatcatcacgtacacgatccaaaaccagggcaatccgatcccggttaaataaaaagagaccgcttttgcggtctcttttgttaatccgctcaatgcaattccgggtgggcattccagaggcgggcgagtttttcggcctcggtgggctcaggcatgagggcgggagcggtttgggcgggcggctcgccggtcatgcggacgtgggcaagggatacccattcggggcgcagggagtggatgcgtccccag

SEQ ID NO: 35811 - DNA, 260 bp, Unknown
  Description of Unknown: RightRegion for integrase B9812 sequence
gaccgaaaaactggccgcctactcgatgggctaagaatcggcgaggcagtcacggctgggtgatcagcgcggccggcagcgctaaaccggcccggcctcgatcagatcaacgggcggcggcacgaacatagatttgatgtcgtccgcgctcccgcgcagccagcgctcgacgtcatgctgctcgattgccacagtggagcgcttgtcctgctggccgagcggcagtttcggatccggcttgtgcatccggttcatgatcg

SEQ ID NO: 35812 - DNA, 260 bp, Unknown
  Description of Unknown: RightRegion for integrase B9813 sequence
ttccactggcgctcgggccgggagatggacatgaccgagttcgacatcccgctggacgagtaggaggcccgcataggctgaccgacacgaaaggccccctgcctcggtgactggcagggggcctttgtcgtacccgggtcaggcggtcactcggcgcacccgcgccgggcgcaggtcacttccccggggccggtgtcgacggcctgcatgtccctgccgtgccacgggcggaccggggtcccgcatgccggtaggtgctg

SEQ ID NO: 35813 - DNA, 260 bp, Unknown
  Description of Unknown: RightRegion for integrase B9814 sequence
gtggtagcgggagagcgtcctaacgacaccccccaagtttcaatgttcatggcagtcgcgtgacccgctatccggcaaggagtgcagggcgcttatgggttgcaatccgatgggattgccctctactttctctggataacgcgtctcggttcagggaatggaagatgaagagaacaatcgcgatatttctcggatgtgctgctctagcggcgggaggcccggccctaagcgaggacgtaacggaaagcacggcggcagcg

SEQ ID NO: 35814 - DNA, 260 bp, Unknown
  Description of Unknown: RightRegion for integrase B9815 sequence
tcactgagtagcgggggcctgcaatcggctcatatacccctgatccgcaaggggcaaaaatgacccgcaaaccagccaggcgcccaaaacgccccctagggcgcacgtctacacccgcccgcccccccaaacgctcccaggccttcccacgggctcccagggccaccctccctcacggcgtgctctgttcgcgctgcggctgtacgtttatccaggccgccgccctgcttccccacagctggctcgcaaatctgcactca

SEQ ID NO: 35815 - DNA, 260 bp, Unknown
  Description of Unknown: RightRegion for integrase B9816 sequence
ggggtcagccgtcagaccctggaagcgatttactcagtggatgatgaggtctcactggggtgagccacacagtgggcataccagcggccctcacggtcccgtgacgtggtcatgctcgctgggaatagccaggcccctgagcctccatttcgcgtacgccgtgcgcatcgcgacgacgcgtacgtcgagcccggcgtcgcgccacgcgtcgcgcgcgaaacggatctcggccacctgcgtgagcggcttgtcgtcggcgt

SEQ ID NO: 35816 - DNA, 260 bp, Unknown
  Description of Unknown: RightRegion for integrase B9817 sequence
tcgaaaggaactcagtggtacactcctccttacaaaataaaacttaagcttaagtataattaatttcggggtcttttaggccctcattcatagggtactaattgatacctaaagcgtcatatagctgtttttaggcaaaaagaagaggccctgtcattgcgacggggtttctttacgtgtaaaaagaagagcccatgtatcgggcccgaactaaccttcgaagaacaacactacatcgacaggatcttgaaattcctgtt

SEQ ID NO: 35817 - DNA, 260 bp, Unknown
  Description of Unknown: RightRegion for integrase B9818 sequence
aaattcaacctttaccccgaattaaaaaaggacttgactcgttctggttttttggtattatgatgatacaacctattcgttagatgttacatcataatactaaattacgaagcccacggggcagggaggtaatggggatggcaaagaaagtttacgaagcggtacagttgcccagttgcatcgaaaaggatcgcatggagtggtccggcgacgaatggaacatctggattgaacgcttggataacggcaaagtcaggctg

SEQ ID NO: 35818 - DNA, 260 bp, Unknown
  Description of Unknown: RightRegion for integrase B9819 sequence
ttacaagacaaaaaggtgaaattaacctttaaatcagcatttaggaagatacgccaacgctaaactttatcttaaatttcagttgatacataattttcacaaaatctgaatttcaacccgcacttagtgcgggttttcttttgtaaaaagcaggaaatccgtatatgatgctcactttacttttttgaaaaatgagtaaaaattaaaatgttgaaattcagaaaagttataaggaaattcagatatggaacacaaacaag

SEQ ID NO: 35819 - DNA, 260 bp, Unknown
  Description of Unknown: RightRegion for integrase B9820 sequence
tccaaaggaatgcaatggcatactcctccttataagttaaaaatgaagcttaaatataaataatttaggggtcttttagaccctcattcatagggacctatatgataccgaaagcgttatatcaatgtttgtggagaaaaaaaagaagagaccgtgcggacattacatccacacaatcattccttctttaccgaacatctcaaatttcttagaagctttcttgaagtccaaaatgtctaattttacatctcttggtttac

SEQ ID NO: 35820 - DNA, 260 bp, Unknown
  Description of Unknown: RightRegion for integrase B9821 sequence
ccgaacccggtgtactttttcaagaaagtgttcgccgtggtggtaaacttcacgcggaaatagcgaaaaataaaagcgtcagggcttaggctctggcgcttttgttatgcccggtcgtctctcgatagggctcgagaaatagagcctgctcagctcggcagctatcaccgttcctctctggcctcctcggccgcgtggctattgtttacgggttgcacgggactggctgcggcgcctgctgccttcttgtctcgttttaa

SEQ ID NO: 35821 - DNA, 260 bp, Unknown
  Description of Unknown: RightRegion for integrase B9822 sequence
ctgacaagaggcggccagtggacagacccaccgatagagcttgacgtcaagctcaaaatttagccctttgacttccatcatcgtgcaaccgatgaatcggtacctcaatgatggaaatgattgaaagacataaaaaaagccctgcagattaaggtctgcggggctttttgtgttttatagcgttgtgggcggcgccgcgcttgaggtagtagtcgtgcacggccaggagctcctctttgtgcttgagctcgaggcgctgc

SEQ ID NO: 35822 - DNA, 260 bp, Unknown
  Description of Unknown: RightRegion for integrase B9823 sequence
tcaaaaggtatgcaatactacacaccacagtataagatacaagtaaaactaaagtataattaacataggggtcttttagaccctgattcatagggcactaattgataccaacgtaaaaagaagagggtatgtcgcaatgacacgcccttattcttcgtttttgtttgtttgttttgttcttggttttgtcttatgcttgcatttgttcttttcttgattctcgataactagtttcaagtatggactaattccactcttgg

SEQ ID NO: 35823 - DNA, 260 bp, Unknown
  Description of Unknown: RightRegion for integrase B9824 sequence
gaattaagcaaaggaaagatgtttcacagtgagccatttgaaatatcaataactatacggtaacgatgaagccctagaaatggggctttttctttttagggtacatgtaagccctcattcatgcgggtatagatgataccgaaagtaaaaacaagaagaaaagagaatagcaattgctattctcgctatgtattaattggaggggcaattaccacatgtaacgtcaacgacctcaaacaagtctatgcatctgtctattg

SEQ ID NO: 35824 - DNA, 260 bp, Unknown
  Description of Unknown: RightRegion for integrase B9825 sequence
aatcgtatcgaagctgtggactcggggtttgtcattacctggtacttcgagacaaatccataaacaaaagggacactttgctacaaatggcattgtgtccctttttgtatgccctgatgtcgaaattcgacatcttatgccagttttcgtcgctgtatgactacttcccggatattattacaaacgccagttttttcgccaggaatctggtaatattatccgcaaggagtgaccggcatgtacaggattcggattaaact

SEQ ID NO: 35825 - DNA, 260 bp, Unknown
  Description of Unknown: RightRegion for integrase B9826 sequence
tcactgagtagcgggggcctgcaatcggctcatatacccctgatcagaaaggggcaaaaatgacagccaaacgcaccaggcgcccaaatccccccccagggcgcacgtctacatccacccgcgcccccaaacgctcccaggccctcccaggggctcccaggccaaacacgcggggggccaaacttccccccggtaagctctgccagcgctgcggctgtacgtttatccaggcctcggcaatcctccgcaatctgcattcc

SEQ ID NO: 35826 - DNA, 102 bp, Unknown
  Description of Unknown: RightRegion for integrase B9827 sequence
tttgaagtcggtggtgactggacaaaaccgccaatacaccttgatattaaactgaaagtataagggcaaatttttttgccctaccatatccaacatcaaggc

SEQ ID NO: 35827 - DNA, 260 bp, Unknown
  Description of Unknown: RightRegion for integrase B9828 sequence
gaaatgtcggagtggggcgacgcttggctttcagcgcgccgacgctggcaagagttgcggtaggcccacgcgaccgcatcccagaactcgtccatgcattcctgctccgtcatggggttgacctaacgacatgcgccggatcgtcgtggccttttggctgatcactgcaattgacagagtcttacggtaatccgctagaggtacgatgacacggtaggggcccccgtcctcctgatccacctcatgatccgggggcccct

SEQ ID NO: 35828 - DNA, 260 bp, Unknown
  Description of Unknown: RightRegion for integrase B9829 sequence
ttcgcagtggatagtatgaactggctccccaagtttcccgtcttactaaccgcagtaagatagccgagccggaagtctggttccgcatcgtccacgtaactccagaagataacagcgatttttcgactcaccaggagcagaccgtggagatagcccttggcccaaagggggcgttcgagaacggaaacataggaactatcaagcggcaggtgttacctggcggggtggttaacgcagtgccgcctcggctttcaaaacca

SEQ ID NO: 35829 - DNA, 62 bp, Unknown
  Description of Unknown: RightRegion for integrase B9830 sequence
aacaggttttgggattcatcgacctgctcgtcgacatgcacagatatcgcagaccaacacta

SEQ ID NO: 35830 - DNA, 260 bp, Unknown
  Description of Unknown: RightRegion for integrase B9831 sequence
aacaaattaacaatgaacctaggcaaatcaatagcggctaaattagcaaatattccagcgtaagatacaaacaaaacaaccgagaagttaaagacaagctaaagcgcttgtctttttttttgtgactaatttctcgtacaaatccgagaaaccatatattgctttgtattaaactgttttgcaatttcaacttgctttacaccagaaacaaacagagctttgatcttttgttctattaatggtgaaaacatcctttgatt

SEQ ID NO: 35831 - DNA, 260 bp, Unknown
  Description of Unknown: RightRegion for integrase B9832 sequence
gatgtttcggatgcggggtttgtcattacttggtatttcagtgacaatacagtaaagcaatagttaataagcatgagtattatgtgttttcaacatgatgctcatgctttttttgttggtttctgtctgattcacatatgattttgtcaagtcctgccggattctgtcgagttcgcccataaactggtaattgccggatttttaagcaagaatctggtaaaatttgacaacgaaaggagaacccggtatgtttcagatca

SEQ ID NO: 35832 - DNA, 260 bp, Unknown
  Description of Unknown: RightRegion for integrase B9833 sequence
gtcatctgggatggcgagaatataaccataaatcccgccggagtgcctgcctctttggggtagctcaggcgttgccaaagtgtcacagtagcattatcaaccctaccactttggcaacgccttccacctactccattcaccaccgccgcaccctttctcttcccactgccactgttgccgatcgtgtctcctatgcccacactcgctccggcctttctttcaccgcactggccgtccccatgcagcagaaccgtgaaacc

SEQ ID NO: 35833 - DNA, 137 bp, Unknown
  Description of Unknown: RightRegion for integrase B9834 sequence
ttgagcgaggggatagtagtagagaaaactcagtatgtatctagggagaaatggcgctggtaaatctaccacattgaaaatgctgaccggtatgatgaaaccaactgcaggaaagatttactttgatggaaaacttt

SEQ ID NO: 35834 - DNA, 260 bp, Unknown
  Description of Unknown: RightRegion for integrase B9835 sequence
aaaggcattacgatcttcggaaccgtgttcatgatcatcattgaaacaggccaggacgcttgatagcatcccggcctgttttcttgtgtagctctctttttacttcctgacgatcttgaaggtgacctcgtgcccggggttctccctgatcagcaactccttgacctcatcgactgtcatgttgttatccagcgcggcctgaatcacttccaccagcttcttgccgtccagataggcccagatgtacgtgcgcttgtgcc

SEQ ID NO: 35835 - DNA, 260 bp, Unknown
  Description of Unknown: RightRegion for integrase B9836 sequence
accgtgatctatatgatcggcggcatgttcgtcctggctcttccgcttaaagaaacgcaataaacgagaaaaaggctgcaccttttataggcgcagccttttgtaatatccatacgaaatatgtaattctgttccgatctcgggttttggtgtaccttacacatacaaaatctaaggaaaggagcatggctatgattaggattttcctgtccaggaagttaggcgagcttcgctggacgcaggccgatctgtcccgtgcg

SEQ ID NO: 35836 - DNA, 60 bp, Unknown
  Description of Unknown: RightRegion for integrase B9837 sequence
ggcgggacgatcctcgtccgtccggtcgatccggctttatccctcttgttcggaatttct

SEQ ID NO: 35837 - DNA, 260 bp, Unknown
  Description of Unknown: RightRegion for integrase B9838 sequence
ttgaaaacaggtgcaacttggacaaatccaccatttgaagttgatgtgaaattgaaggtgtaattcttttaccatttatttccatcattaatgagcatatgagttagtacatctatgttggatataattggtaatatatggaaattatatttttttgctgactatctccatcatatgtgtgcttgttcatatgttcatatatgatggagttaagtggcaggcttgatatgacaatgtttaagggcaggtataacctgccc

SEQ ID NO: 35838 - DNA, 260 bp, Unknown
  Description of Unknown: RightRegion for integrase B9839 sequence
tacgaactcaataccgttatctatgtattgcgggatgttttcgtattggtcactgacctataatcagcagaggcatcacgttttattgcgtggtgcctctgctacgttcgccggtcttgacgggatacttataacgtattccgtgataatctaacattttcaccacaaattcccggatttgcggtagattatcactaaaggagcggcataagtatgattaagatttatttgtcaagaaagctcggcgagctgcgcttgac

SEQ ID NO: 35839 - DNA, 61 bp, Unknown
  Description of Unknown: RightRegion for integrase B9840 sequence
ctttcacagccggttccctgcttcccggagctacctccgctccgcctggatctccgctttc

SEQ ID NO: 35840 - DNA, 260 bp, Unknown
  Description of Unknown: RightRegion for integrase B9841 sequence
tatcccggcggcaagctggaaatcatcttcggtggcggttaccttgtcgaagaatccgtctaagcgtaggagattgagggatcatccctctttctctttctttatttcatcgtggatgttcttctgaatcgcatcgagaagggcgaccttttgctctgttgaacattccaaccttgagatgtaattataaatcaactgtgcatggacagttgcaacgcgcttggcaagttcctcctgactttcctttgagcgcagcaaat

SEQ ID NO: 35841 - DNA, 260 bp, Unknown
  Description of Unknown: RightRegion for integrase B9842 sequence
aatcgacacgatgaaatgactgtcacattgcttggaggactgaagttcaaagaactgctgtaggagagataccatgaaaaagacacgctttatcccatacggctacaccatgagagatggccacacggttatccagcatgatgaagctgatattatccgctacatcttccaatcgtacatcaatggtgcgtcgctcaaggagattgccgaggagttgacacgccaaaagataccttatacggagaagacagatgcgtggg

SEQ ID NO: 35842 - DNA, 260 bp, Unknown
  Description of Unknown: RightRegion for integrase B9843 sequence
tttatccatggtatgcttggtctggttgttttccggcaactgaaaacaactgaaaacaactgaaacaactcaaacaactgaagtaaagcccagaagggaagtgcaggccctcctgggctttttacatcattataccttgtccggtttttccagtttcctgaacgtgacctcgtatgctcccatggcagcgagcgcgacaattacggcattcactgcagtaaggacaccgctctgaacagtcagactgccggtaaaaagtg

SEQ ID NO: 35843 - DNA, 260 bp, Unknown
  Description of Unknown: RightRegion for integrase B9844 sequence
gaatatagacataaaatcttcaccttcgagttctgtgtcaaaatcaaacaaaagagccagtgatcactggctctttctgtacatggtcttgatcttcccatccgccctgcgtaccttcaccgtcaccacctcgccctgttttaacattccccgcaggagatactcactgtatttcaacccatgcccggtggcgcgtgaaaaatcctccgcggtaaaatctcccggctgttccaccgccagcttgtgcccctccgccagct

SEQ ID NO: 35844 - DNA, 260 bp, Unknown
  Description of Unknown: RightRegion for integrase B9845 sequence
ggaatcataatctttgggacaacgttcatgatcaccgtacaaattgaaaaccggggcggttaaacaccgtcccggttttcattgtgtcaaaatctgtacttccggtgaatctttccccggttgtcttccagcgtaacacggataaccttctttttccggttctcgccccagcgctttgcgaaatcctccgcttcacgcggttcaagtgtgtctgtgttcgccacattctcccgtgtaccgtcatcataccagacgtacac

SEQ ID NO: 35845 - DNA, 260 bp, Unknown
  Description of Unknown: RightRegion for integrase B9846 sequence
tggtatagcatacaaacagataaaagaaatagcgtagatgtggggattaaaatagccgcataaaacaatttatacaggttttgtctaaaatctcaatgcctctttggttattactaaatattcaaagtaatagctaaggaggttttttttatgattaaacttgagaaactggaaaaaggtgagttttttgaggatgcttttcttgtatcctacaggtacaacaaagattatttaaacaagatgagatcactcaaatacaa

SEQ ID NO: 35846 - DNA, 260 bp, Unknown
  Description of Unknown: RightRegion for integrase B9847 sequence
atcgatcgggtcaccggggcgctgattgacgggctggatgtcagtgccccggaggtgatgtgagatgccgttattcagcggcacacccgacaaatcgagcaccggcagcggtgtagccgatggcttcgccttcatcgaattcggggacgatcttgcgatgcgagaacagacccttccccgtgtgtcccgctgccagatagacgcgggccatgccggccagagtttggaagtacggcacagcggcttcacggatgtaggga

SEQ ID NO: 35847 - DNA, 260 bp, Unknown
  Description of Unknown: RightRegion for integrase B9848 sequence
ggtgcgcacaatgacaatccgattgggttgcagagatacttagactatacgaaaaacggatagcttagcggggcagttcaactacctcgccgcgcgcctcaaggatgaaacaatcatccttgcgctggtagaaaactggcacttcgccaaagtagatacagccctcgtcgctgttccaatgcacggggtcgctgtccgcatgttcctgaaactgctctgctacaaattcccaatttaccatttcatctactcctgtttgc

SEQ ID NO: 35848 - DNA, 260 bp, Unknown
  Description of Unknown: RightRegion for integrase B9849 sequence
atgcacttatccgaacacatcatatttgtaaatggtgttattgggatgatcgtgcagagatgaaaataccctctccggattggagagggtatttttttattttgcgatatgctcataatactccatcagctttcgctccgggccggggccgtccttgtcgagcagaaacgcctttgccagagcagcgtagaactccgggcggttgaggccgaactctacggcgacggggtagtagtccgagtacatcatgttcatggtca

SEQ ID NO: 35849 - DNA, 260 bp, Unknown
  Description of Unknown: RightRegion for integrase B9850 sequence
gaaaagatagtacttaaagaaagcaagagaccaagaatgacactacacggacctataaattagaacacattatataagaaacagggcctgctgaaaaccaaacttcagcaggcccttaaaccaatacaatgaaaatgaattataacattttatttatctgcctttatttctcctgcaatccgtatcagatatacgagcagtataacaaacagactcttaccgaatgaaacgttaatgcttatatcaaggaaccatgtgag

SEQ ID NO: 35850 - DNA, 60 bp, Unknown
  Description of Unknown: RightRegion for integrase B9851 sequence
ccgatattgagtgaagggatagtagtagagaaaactcagtatgtatctagggagaaacgg

SEQ ID NO: 35851 - DNA, 260 bp, Unknown
  Description of Unknown: RightRegion for integrase B9852 sequence
gttctttatccccgaatacctggagccgagggctttgtgcgcggcgtgaatgagcctgaatgagggcttatcaacgataacatcttgggtatgtttcgttatttccaagaagttatcgttgacacgctcccaaagtgacgctaatgagggcactcctcttttctttcttctgaaattgcctcgaaaagcgtccggcacttgattgtgcgctcattctcgaaatgatatgatagtataaatcctgctccggaggttggtat

SEQ ID NO: 35852 - DNA, 260 bp, Unknown
  Description of Unknown: RightRegion for integrase B9853 sequence
atcggagtggtcgcgccgtatgatcgaaagattcaagagcaaaagaaaagagccagggtataacgccctggctcttttgttgctattctttttccggtgttttggtttctctgaccgtctgctcgatcttggtgttgagccagaggtcgaagtttccatactcctcggcgatgatcttctgagtctcctcgtcgatcatgttgcgagcttctgactttgccatctcgaaagccttgctctgtgcttccggcgtaaaggat

SEQ ID NO: 35853 - DNA, 260 bp, Unknown
  Description of Unknown: RightRegion for integrase B9854 sequence
atgcacttatccgaacacatcatatttataaatggtgttattgggatgatcgtgcaaagataaaaaatccctctccggtttggagagggatttttttattttaccacatgctcatagtatttcatgagcttgcgctccgggccggggccgtccttgtcgagcagaaacgcctttgccagggcggcgtagaattccgggcggttgagtccgaattctaccgcgacggggtagtagtccgagtacatcatgttcatggtcac

SEQ ID NO: 35854 - DNA, 260 bp, Unknown
  Description of Unknown: RightRegion for integrase B9855 sequence
atcggagtggtcgcgccgtatgatcgaaagattcaagagcaaaagaaaagagccagggtataacgccctggctcttttgttgctattctttttccggtgtcttggtttctctgaccgtctgctcgattttggtattgagccagagatcgaagttgccgtactcctcggcgatgatcttctgagtctgttcgtcgatcatgttgcgagcttctgactttgccatctcgaaagccttgctctgcgcttccggcgtaaaggat

SEQ ID NO: 35855 - DNA, 260 bp, Unknown
  Description of Unknown: RightRegion for integrase B9856 sequence
atgcacttatccgaacacatcatatttgtaaatggtgttattgggatgatcgtgcaaagataaaaaatccctctccggtttggagagggatttttttattttaccacatgctcatagtatttcatgagcttgcgctccgggccggggccgtctttatcgatcaaaaacgcctttgccagggcggcgtagaattccgggcggttgagtccgaattctaccgcgacggggtagtagtccgagtacatcatgttcatggttac

SEQ ID NO: 35856 - DNA, 260 bp, Unknown
  Description of Unknown: RightRegion for integrase B9857 sequence
atcggagtggtcgcgccgtatgatcgaaagattcaagagcaaaagaaaaaagccagggtataacgccctggctcttttgttgctattctttttccggtgttttggtttctctgaccgtctgctcgatcttggtgttgagccagaggtcgaagttgccatactcctcggcgatgatcttctgagtctcctcgtcgatcatgttgcgagcttcagactttgccatctcgaaagccttgctctgcgcttccggcgtaaaggat

SEQ ID NO: 35857 - DNA, 170 bp, Unknown
  Description of Unknown: RightRegion for integrase B9858 sequence
ccggaaacgggtgccagttgctttagcgacaactcactggtagcgcgaagtggatctccctgaagcagcgcggcttgatgtaagctagaaatcccagcgacgcagtaccccggcagtggttgtacgtgccgggagggtaacacggagccggagggagcgtggatggtcga

SEQ ID NO: 35858 - DNA, 61 bp, Unknown
  Description of Unknown: RightRegion for integrase B9859 sequence
gtaccgatattgagcgaggggatagtagtagaaaaaactcagtatgtatctagggagaaat

SEQ ID NO: 35859 - DNA, 260 bp, Unknown
  Description of Unknown: RightRegion for integrase B9860 sequence
gaatcatccggcggccgttggactaacccgccgatcgaacttgatatcaaattgcgcctataatttttttgaccttttgacttccatcattggggaacggatgaacttgcgccccaatgatggaaataatagaagaatgcttatataacaacgtttccggggcatctaaaacaatggccgcaacgtgatatatataatatgccacaaatccaccttccctttttcggcgatattgccaatggtatttttgcgccgatggt

SEQ ID NO: 35860 - DNA, 62 bp, Unknown
  Description of Unknown: RightRegion for integrase B9861 sequence
atagtttgggacggcaagaatatcaatatttttattaaaggtatttcagaattatcagaata

SEQ ID NO: 35861 - DNA, 260 bp, Unknown
  Description of Unknown: RightRegion for integrase B9862 sequence
catccgatggggacagaaatcctgtctgcgtcagaaaggctacaagcgctggccgcgggataacccaacgcccgccaattttatatccgttcagccgcagggtttttaccctgcggtttttttgtcggtactgaactccacgtttgcaccagttcacgacagtgtctgaatcaacctgcatgatctttgccactaccttgggcgtcatgtcgagaaccattggtacctcctgtttcaaaaccgaaaactccgaaatcatc

SEQ ID NO: 35862 - DNA, 260 bp, Unknown
  Description of Unknown: RightRegion for integrase B9863 sequence
caaaccccggtcctatacgccgtccccggcggcttcgtgcttgcgctcaggctggcggcgtgagggcacgcaaaaaggccccgcccggtatagcaggtgctatatcaggcggggctttctcagccttcggcgtcctccggatcggcgggcggttcgtcttctttggcgaacaggtaagcggggttcgctgcgccggcggcgtcggccagaccctcgccgatgatgtaggcgatgacgctggcggccgacatgatcacgcc

SEQ ID NO: 35863 - DNA, 260 bp, Unknown
  Description of Unknown: RightRegion for integrase B9864 sequence
atagtttgggacggcaagaatatcaatatttttattaaaggtatttcagaattatcagaataagccaattgaaatacctaagaaaatcatttccgccatgtgtcaacagcagttgcagttgaagaatcgtggaaacgataatcacaggcttgttacccacatcgcaaaagcaaggataaataatggtttatctataactgaaatatgtaaactaacaggattgagttatgataattacatcaagtatgaacgtgacgaag

SEQ ID NO: 35864 - DNA, 260 bp, Unknown
  Description of Unknown: RightRegion for integrase B9865 sequence
agcagaaaatacagtaacggtcaacctggaaacaaggtcggctggaataagaaggaggcataagatggcaacagcaacaaggcgcgtcgtgcgcgagataccgagagcaatgctgctcaatataaacgcagaagaaatcatagaaaaaacacccgtggcagcatacgcccgcgtatcgacggagcgcgaagaacaggaagactccttcgaaagacaggtggcacattacacggcactgatacaatccaagagcgaatgga

SEQ ID NO: 35865 - DNA, 260 bp, Unknown
  Description of Unknown: RightRegion for integrase B9866 sequence
gatggcttagttaagccaatgcatttttatattgaaattccgaaaagaatgccaataacataaatcaaaaaaccctctaaaaaaaatagagagtttttttttgccttaagggtgttatcgcaacagcctaataggcttgtaaccaataaataaataataaattaataattaaaactaattatgaaaacaaaatttattctacgcttaaaatgaaaattaaacagcaaacctccaaaacaaacccttgtatctgttgtttc

SEQ ID NO: 35866 - DNA, 260 bp, Unknown
  Description of Unknown: RightRegion for integrase B9867 sequence
ctactgggaacactatcagttaaattcagattaccttcaacatttcataaaaaagctgcttaaacaattacttatactagtttaatggatgtgcatttaataacctaagaccataacgccccttattatgtctgtatttttttaacaaaatacagcatatgggaaagcctcgtttattaccgttaattgaagtttattttaagtgccactcttgtgggcatgattttaaggctgtgcctggtgaaacagttgaggcccct

SEQ ID NO: 35867 - DNA, 260 bp, Unknown
  Description of Unknown: RightRegion for integrase B9868 sequence
agatggctgagggtagagaagaaaaccggtagctgggcggccgctatcgaccgccctctgtgatcgttaagctgatttcttgccgtcttggtgcatgcctggaggggtagtgtgcaccaccaggtgcccttgtccctcccagaaattctcttgcacctccacacacacccgccatgcggcccatgcgacctcttcgccggccgcgagaacattgccctgatcatcaatgattgccatgcgggctctggttcccgatttgg

SEQ ID NO: 35868 - DNA, 260 bp, Unknown; identical to SEQ ID NO: 35706
  Description of Unknown: RightRegion for integrase B9869 sequence

SEQ ID NO: 35869 - DNA, 260 bp, Unknown
  Description of Unknown: RightRegion for integrase B9870 sequence
gagagcacctgggagttccaggcattctctagaggtgatggtcttagggttaaatggcactaatacgcataaggtctattagtctgtgaaaatttcgtgcggcgaatttattagccttttgctcagattcatcttgctgtttgtctagtccgattccgcgagataggttgtcgtgcttgaggtgatagagttcgtgagccaatgtttctgctgtgcattctggagacagtgactcgctaataaagatgtgtggtacgttt

SEQ ID NO: 35870 - DNA, 260 bp, Unknown
  Description of Unknown: RightRegion for integrase B9871 sequence
ggtcgcgtctcccggctggtattcaagaacggtctgacccattccttcctctggcgggcctgacctttttcgtggcgtcacgaaaatggtacgaaaaaagcggagtagccgttatgactactccgctttcgcgttcctctgtgggtcagatattcggttgtttacgtttgcaagaaaacggtgtcaatagatgaacatagcatccccaacctttaacggttgtgaccgaaatcttccttttgtaaacaacgccatcttac

SEQ ID NO: 35871 - DNA, 260 bp, Unknown
  Description of Unknown: RightRegion for integrase B9872 sequence
acggcgtgcagtaaccgcgtttccaattgggcgggctttgaggtaatctaccagaggaaataacgacactgacgcagaacaggtaggcgggaggatgagcaatggaggagcggcatcaggcagcgctggacatgctggtcagtgctctgtcagaaggagtaaaccccgaagaactccgtgcggccgtggaacagctgatcgcggcccggcaaccgaaggtcaagccaaaagcagagcccatacgcgcgtgggctcacggg

SEQ ID NO: 35872 - DNA, 260 bp, Unknown
  Description of Unknown: RightRegion for integrase B9873 sequence
gaatcaaccggcggtcgatggtctgcgccaaatattgaattgaatatttctttgcgcctatgatttccatcatcggggcgcaaattcatcggtacaccaatgatggaaataattaaaaacgccgttaaataagcatttcaaaagggaagggcaagtgcctttccttttttatttatatatcatattcctaatattttcaaatagtgttattatactatcaaaaaatggaggtttgaagcatggtttttttcgaaaaattt

SEQ ID NO: 35873 - DNA, 260 bp, Unknown
  Description of Unknown: RightRegion for integrase B9874 sequence
aatggcccagcaggtaatcaaaaaggatggatgcagaagaaggaggcagcagcatgtcagtaactacaagaagagtagtacgagaaataccacgcgcagcaattatccagatggagctgccgcagattgaacgtgatgtggtcgccgcatacgccagagtatcaacagaaaaggaagagcaggaagatagcttcgaaaggcaggtcagccactacacagccctaataacatccaagccggaatggaagttcggtggtatc

SEQ ID NO: 35874 - DNA, 260 bp, Unknown
  Description of Unknown: RightRegion for integrase B9875 sequence
acacccattaatctagtacaaatctttcctcgtaaaaccaatgttcatggtaaaaatatttaactaggattatatcataataaaataaaccttgcagaactatttttatctgcaaggtttattattacttaattaaagaatcttcaattactctctttgcttcgtctaagatgtttttgtaatgaccacgagatgagacccactcatcatttacatataaatcatatacattatcacctcttagtttaattgtaatatca

SEQ ID NO: 35875 - DNA, 260 bp, Unknown
  Description of Unknown: RightRegion for integrase B9876 sequence
ctattgttctataaaggtgactttatgctgatagttccgttcgatgagaaggttttagactaaacaataagagaggtgttttcacacacctctcttttttgatgctcccttttccgtaatattcttacgggcatgtggaataatcttccgttttcgctcaaattgtcatgacaagcgtaaaatatgcggaaaggagcaaagcaatgattagaatcctattgtccactcgtctcggcgaaaggcgttggacacaatcagat

SEQ ID NO: 35876 - DNA, 260 bp, Unknown
  Description of Unknown: RightRegion for integrase B9877 sequence
gagtgtaccgggggttcgtcatatccgggcggaggattagttcccggatttggtaagttataaaaatgagccgtctttcatgcattcgcgataaacgcgctcgatattctcgatagccagcgcagctttgccgtttcggaagttgggatttctccggcaaaaattttcatatgcgttaatgtcttcgagcacgtcgtcgaaaaattcgcgggaatgtttcacatggttataaatctcgtcattcgtgcgcaatatccgcc

SEQ ID NO: 35877 - DNA, 260 bp, Unknown
  Description of Unknown: RightRegion for integrase B9878 sequence
ctgcgaaccacttgcacgctggcgatcgcgctgccactggagatgctgaagcgcgcagcttgagcccgggtgcggggctgcaaatgcgcgccccgaatcgtgagagtgcctgcaggcgagatcctgcatggccactccaaccaacatcaccgcttccatcgccagcggcgcttcgctgctggttggcgttgctccgccgcctccccctccgccccctccgccgccgccgccgcccccgcccagcttgacgctgagcgtcg

SEQ ID NO: 35878 - DNA, 260 bp, Unknown
  Description of Unknown: RightRegion for integrase B9879 sequence
ttgctgggaaccaaagttataaaacttgatttacctgaaaaactacagaaaaaagctgcttaatcaataagttaaatttcttctatatgttggtatttgatgcagtatctgcaaaccgtggcttaatattttattgattctgcacagaatttacagtttttcatttattgttttggttgcgtattttctttggtatcagattgaatcttttgttgcaaaggctgaagccaaaaaacagcaacaacgacgactataatgcc

SEQ ID NO: 35879 - DNA, 260 bp, Unknown
  Description of Unknown: RightRegion for integrase B9880 sequence
tatctaggcggtggtagcgggggtccgctttcgactccagctatcagggttcgaattatctgatttaccgcagaagaattcaatcgttggttgacttcccccgcccgtctggctctcgccttcggctcgcccgtccccttcggggaccggccgccagtcgggcgggagaagggccgcgacctaacggtcgcggccccgctttcaaaccaacaacaccccgacaataaaccccaatacgaaaccgatcagcagcccggtgc

SEQ ID NO: 35880 - DNA, 260 bp, Unknown
  Description of Unknown: RightRegion for integrase B9881 sequence
cccggaggaatcgtgatattcgggtcaacgttcatgatcatcatagaaaaccgggccggttagcaccgagcccggtttttcttttcctcttgcagaatccgaatctgattttcaagatcctgtatctgtttgtcaatacgtttttcttcataatccccgtaaagcagaactttcaaatcctcatccaccgcatccgctatcagcagggccttttgaaaagacaaccctgtcacacgttcgcccttacgcaagcgggaaag

SEQ ID NO: 35881 - DNA, 260 bp, Unknown
  Description of Unknown: RightRegion for integrase B9882 sequence
tccgatggtcacgttaccgtgatggagttccgtagcggactcacgatagagttcaagtattaggaggaagaaatgccacagaccgaagcgcagaagcgtgcgtatgcgaaataccacaagaagaacatccaccgtgtgtcccttgacttgcagaaatcctactacgaaatcgtcaaggagcacgcagacaaggcaggcgaatccgtgagcatgtacattaagcgggctctcgaggctcgaatgtcagcagaggattgaaa

SEQ ID NO: 35882 - DNA, 260 bp, Unknown
  Description of Unknown: RightRegion for integrase B9883 sequence
tctgggtatggttgcgggggcaggatttcgcacccagaaccacgccggatccgcatccgctagccactcgcagcaccggccacgccaccctggcgtggccaccccctccccaagcacgcaacgccgacgatccgcgccggacgatcaacacgcgcgcctgcaggtgcgcccgcgcgaagtggaaaagctaaaaaccgtggggccatcggaaaaaggtaacaaaggtaatgtttgccatcgacacagcggaaagctagaca

SEQ ID NO: 35883 - DNA, 260 bp, Unknown
  Description of Unknown: RightRegion for integrase B9884 sequence
gagttcaccggtcattggtttgtcattacttggtatttcggagacaacagcgtaaagcgatagtaaatacgcaggagtgccgcggctgcgctcctgccttttttgtctttttctgtcgcgccccgccacaatatcacagcattcggcagcatctgaccaattatccagtattcttacaaatgccagacttttcgtgtgattgctggtagaatattccatgaaaggagcaatgggcatgtaccgaatcgttgtgaagctgg

SEQ ID NO: 35884 - DNA, 260 bp, Unknown
  Description of Unknown: RightRegion for integrase B9885 sequence
ctatccctaaaagcgcacagggataagatcagccccgcaatatcaggcagaggggggaattgatatgacagcaagtgacaagctattaaacaatatgctcaaggcaattgagcaatacaacaaggaaaacaaggacaaaatcacaccattgcaggcactcaagatatactgccggatgatcaaataaaagaaagagcaggggatcaatcccctgctccttttttggcctcaagctcacgcttgatcagattttcaatgta

SEQ ID NO: 35885 - DNA, 260 bp, Unknown
  Description of Unknown: RightRegion for integrase B9886 sequence
gcatacgaactcgtattttatgcgaacgtctttgcgctgatcgtaaaaatgccggaacggtgaaaaccgtcccggcattttcctttttcagatttcctgttcagacagccattccgcaaactcctcaagggtgagaaggtttacaccgatccagcctgcggaatatttttcttcggaaaagtcgaagtaataattttctacagttttaggctgcacgttcagcttacctcgatgctgtagatagtccatgatcttctcca

SEQ ID NO: 35886 - DNA, 260 bp, Unknown
  Description of Unknown: RightRegion for integrase B9887 sequence
gaaccgaaccacgcctttgtcttccttcgcggccagctcggccttgtcatcttccgggaataaacggtttgttgcttctcttttcagatcacttcaagcatgatccgtctttctttttttccatcgaaccatttcaggcatggtttgtccccgaaattcgtcagcacttcgctgagcagatatgtatttccctcgatgtctaccagtttctcccccatggcgttttcgctgatctctacctcatccgggatatacactct

SEQ ID NO: 35887 - DNA, 159 bp, Unknown
  Description of Unknown: RightRegion for integrase B9888 sequence
ccagccccggaacggatgactgcttgcggcgcgttcccttcacccgctccacgttttcgctgaagtcccgaacgtcgccgttccgcggccgccgttctacataggctccgcgagttgcgtacggttcctgccgccggacttcgctgcgtagagcatcgt

SEQ ID NO: 35888 - DNA, 62 bp, Unknown
  Description of Unknown: RightRegion for integrase B9889 sequence
agcaaaccaaagtatctaaagtctcaagatgactttgatcttggaattgaatggaaaaccta

SEQ ID NO: 35889 - DNA, 239 bp, Unknown
  Description of Unknown: RightRegion for integrase B9890 sequence
tcaaagctcgaaccaagatatatattcattggtggtatgtttggttgtatattctcgcgttaaacgtgaagataaaggattgtctgatttcatatctatttcccgcggccgattaaaggccgcttttttatcttctaacttatgcaacatgcacaatatcatcaaaaagtatatttcaaggtgaatgaaatgactaaaatttttgtattttttagctaaaaaccgggctcgccgcaacc

SEQ ID NO: 35890 - DNA, 260 bp, Unknown
  Description of Unknown: RightRegion for integrase B9891 sequence
gataatattcatatagaatggaaagaatttataaaatttcttatatctaataaaaataaataaccagatattaatctggttattttaaattactcatctataatagttactttattcattttatcaccttgattaattttatctacaaattccataccatcaataactttaccaaaaactgtatgaatgccatctaaatgaggaaaagaatcatagcaaataaaaaattgactactaccagtatcttttcctgcgtgtgc

SEQ ID NO: 35891 - DNA, 260 bp, Unknown
  Description of Unknown: RightRegion for integrase B9892 sequence
atcggggtggtggcgccgtatgaaaagaaaattcaaaggcaaagaaaaagagccaagacttaatgtcctggctctttccgtttgtaccggtgcaattttaacgaataagtcgtgccatggtttctgctacatgggtcatgacgatatcgatcctgtctttgatgccgttcagttcagcttccgccttctgaagagcgagagcgatatcaggatcatcttccgtggcattcatgggctcataattctgatcaggcatattc

SEQ ID NO: 35892 - DNA, 260 bp, Unknown
  Description of Unknown: RightRegion for integrase B9893 sequence
gaaaaattgcatataaaatggaaagtgtttatagaattattaatatcaaacaaaaataaataaccagatattaatctggttatttaaaattattcctctataataaatactctattcattttatcaccctgattaatcttgtctacaaaatccataccatcaattacttgaccaaaaacagtatgaattccatctaaatgaggaaaagaatcataacaaataaaaaattgactactaccagtatcttttcctgcatgtgc

SEQ ID NO: 35893 - DNA, 260 bp, Unknown
  Description of Unknown: RightRegion for integrase B9894 sequence
tacgaactcttttggtttcaaaacgtgttctgcctgacaatagaaataccgtggaagcgttaagcctccacggtatttttatttgccggtaacttgcagaaatgcgtatctcctactctggaccacccttctatttgacttaaaattgaaatgagcttcacttttcagaccgataaagtgaaactcatttcattttttaacttgcgggtcatttgccggtgtagcttattcccacacttccttcttgtgaaggcaccctt

SEQ ID NO: 35894 - DNA, 260 bp, Unknown
  Description of Unknown: RightRegion for integrase B9895 sequence
agaatgctgcggattgaccgcaagaccggggcgtggatggcgcaggagtacggagcggggtaatcagtcttttttcattatgccgtatcggtcggcggatgggataggtcctgcggtcggcactcgtagtgcttctgccgtcttcgatccgcccgcttgtccttcctccgcagctgatcgagaaccaacaaggcggcaaaaccggccatttgcactagggcggaccagcttggctcatggccggagagcaggtgatacag

SEQ ID NO: 35895 - DNA, 260 bp, Unknown
  Description of Unknown: RightRegion for integrase B9896 sequence
gccacgatcatcgtgacgccggccgtgttcgtgctgacggtgccgctgccggcctgcgtataacggccggaaaacaaaaaaggcccgctcgggatctctcccgggcgggtctctttgtgtgcggctcgttttgggcctttttaggcggtgttcttcttcggcgggtatttcctcgccctttgagcttttcgcgctcctgcgggcgcctgagggccctctgcggccgttttaatcgctcccggccggtttcccttccggca

SEQ ID NO: 35896 - DNA, 260 bp, Unknown
  Description of Unknown: RightRegion for integrase B9897 sequence
gaacccgaatttgtatttgtgcatggcgtctttgggtgcattttcccatggggcgagggatgaaatcgcccaaaccatcaatttcattttcagaaccggcggcagggaaagccaaacccagccgccggtttttcacgtttctaattatccgcgcgcgcacgcgcgaggggccgtttggggccgtccaggtgaatgaaattcataaaaaaattaaaaaaattagcgaaatggtgggctcccagcgcccgcgagagaggaaa

SEQ ID NO: 35897 - DNA, 260 bp, Unknown
  Description of Unknown: RightRegion for integrase B9898 sequence
actataccttttgtcttttcaaggttggatatgtacgactatttcaagatgtatcaagcataataaaaagccactttatttagtggctttatctttttaataatgcgatttctttatcgtgcttgtttagcatatcttcatgcttttcgagtatgcagtcatggtcttttgatgtttctactatctgtttcattgtttctcgtaattgagtaattgattcagacaatgcccatgcgcctttaccaaagtatccgataact

SEQ ID NO: 35898 - DNA, 260 bp, Unknown
  Description of Unknown: RightRegion for integrase B9899 sequence
gaacccgaatttgtatttgtgcatggcgtctttgggtgcattttcccatggggcgagggatgaaatcgcccaaaccatcaatttcattttcagaaccggcggcagggaaagccaaacccagtcgccggttttttcacgtttccaattatccgcgcgcgcacgcgcgagggggccgtttggggccgtccaggtgaatgaaattcataaaaaaattaaaaaaattagcgaaatggtgggctcccagcgcccgcgagagagga

SEQ ID NO: 35899 - DNA, 260 bp, Unknown
  Description of Unknown: RightRegion for integrase B9900 sequence
gatccaagaaactgcattgatgtttcggatgcggggtttgtcattacctggtatttccattaatattttgtttcaaaacagttgctgacgagggattcacgcttcaatgggcgtgtttccctcgctttttttgtctgaatcttatagcccaaaatcagaatatgttcaattgcgtcagaatctgtcgagttctcccataaactggtaattaccagatttccgagcaggaatctggtaaaatttgccattgaaaggagacg

SEQ ID NO: 35900 - DNA, 260 bp, Unknown
  Description of Unknown: RightRegion for integrase B9901 sequence
agtgaagatggtacgatgcttcaaggtgcctacacgcttgggccgacggctgaagcctcctgagaaaccctgtgacagcggagataggaaaagggtgcagcgttgcaccccttgtccagcttggccctcagtgacgctctatggcttagcagcgaggcagcttgtgctggtcgctaccgacgtggatttcgaagtagtgccgcttgcgctccacatagtagcgaacgccctcatacgtaactgaaaaggcgtcttcctcg

SEQ ID NO: 35901 - DNA, 173 bp, Unknown
  Description of Unknown: RightRegion for integrase B9902 sequence
tcccacttcgtgccgtggccggacaaaagcggcctggatgtctaccccgcgctgacagtctaattgcaattctgacaggctaattgcaatcctgttcgccgaaatcagtctcgccgaaatcaggctgcaagggcggatcaccgccaaaaaggagggttacacgacgcccccag

SEQ ID NO: 35902 - DNA, 260 bp, Unknown; identical to SEQ ID NO: 35896
  Description of Unknown: RightRegion for integrase B9903 sequence

SEQ ID NO: 35903 - DNA, 260 bp, Unknown
  Description of Unknown: RightRegion for integrase B9904 sequence
cctcctggggcgctgtatcatagacacatattcacccaccccttccgctatacactaaaatagcacccatcatccgggtgctattttagtgtatagcggaaggggtggcgccccagtgcttttgcaaaacatcctatgtagagcgtatcacgctaagccccagctcgcctgcagcagggataccggcagccacgattctcagcctcagccacgcctgcgaattcatagctgcgcagccgtaccacgcgtcagaggctgcc

SEQ ID NO: 35904 - DNA, 260 bp, Unknown
  Description of Unknown: RightRegion for integrase B9905 sequence
tttgtcaaaggattttttgttttgattacagattttgcgggaacattgcaaaaagaggtctgaaatagacctcttttgttgtgttccgtctaaaataggcgtttgaaatcgaaaaaacgcgcgagggtctgacgctccgctttacttaggcgaagctgtagagatttttaccccccttccgggtcgtgccgggccgccccctccctacccaggtgcagggcggcagtgttagtgcgctcatgcttgtacggtgcggtcgc

SEQ ID NO: 35905 - DNA, 260 bp, Unknown
  Description of Unknown: RightRegion for integrase B9906 sequence
cctcaaatagcctttgatataaaaaatgggtggatactttacacatttaaaagagcggcataataaaaatcctactcaataagtaggatttttatttcgataaaaggggttaatactcatcccctgtttaaagcctccgttatagagtatttacgttaggacatccgctcttttgggatttttacatctgtgtactttagaaaacctacggcatataataccgggcgagtcagttatttttattaaattttctgattagt

SEQ ID NO: 35906 - DNA, 260 bp, Unknown
  Description of Unknown: RightRegion for integrase B9907 sequence
gcttccggctacttttcactggttgaacaccaattttcggcccgtttgtggcgcaccgcataatctgtaattattttgtaatctttgcgcaaacaaaaaatgccccgccagcaatccgtcaggatgccagcggggcattgctttacttagtggagataccttgccaattcagatgcaacaaagcctgcgatcactgccgcaatgactgcccaccagagtttgtttccaaatactccgggggctttttccagcgcggtcaa

SEQ ID NO: 35907 - DNA, 260 bp, Unknown
  Description of Unknown: RightRegion for integrase B9908 sequence
gatggaaacaaagcaacattcgtattcacaaacctagtaaagatcacaaaaatagtaaaatagccattaggacatgcctagtggcttttttttatgcctttcactggacttttaatttttttgcggtattgtttgtgttggaggtgtaaaatgacacaagaagaacatgaacaatttataaaagaaggcggagcaacttgccaagattgtaaacaaagaatgctcaaagccgatgggtgtctattcccatacataacaat

SEQ ID NO: 35908 - DNA, 260 bp, Unknown
  Description of Unknown: RightRegion for integrase B9909 sequence
acaaagatactttcccgtacaaaggttaaaaattatgaggtagagctgaggcttgccgcttaatagattgtatataggtttttgaaaatattttataggttttgcctaatatctcacctcttttaccgttactacatggtaaaggaggtttttttatgatcaatcttgagaaagtagaaaagggtgaatatttccgggatgcctttaaggtatctttcaagtatagccctcagacagtggaaaagataaagaggctgggg

SEQ ID NO: 35909 - DNA, 260 bp, Unknown
  Description of Unknown: RightRegion for integrase B9910 sequence
ctaaagggtgttattcaaacctctagcggtatactacatcttagtcagaattattctttctgaggaaatttctcattaagcctctcttcccagtattccttaaacccaacccaattatacaatatataaataacgttaccacctattgcgtaaaagagttcctcacatcctccttcctcatcggtataggaaaaggattcaattcccacttcagggaatcttcttgatacgcgtctaatgtctacagcagacaaatcgac

SEQ ID NO: 35910 - DNA, 260 bp, Unknown
  Description of Unknown: RightRegion for integrase B9911 sequence
cccgccatcatttttgccggtggtctgatcggcctcgtccttccccgccctgtcgattcctgacgggaaaacagaaaagagcagcggatccacaatgggtccgctgctcttttgttattcgtctgtcttttcgtgttttccgaccacttcgccggagatctccgggaccggaggctcctcttccgctccctctgctttgtcgatcgcttgcttgtatgtatcgactcgttttttgaaccaggaaggaaccggagcgccga

SEQ ID NO: 35911 - DNA, 59 bp, Unknown
  Description of Unknown: RightRegion for integrase B9912 sequence
tcagcttttggtctcacagtaagcactccgctgaactggattacttactgccagcctgt

SEQ ID NO: 35912 - DNA, 260 bp, Unknown
  Description of Unknown: RightRegion for integrase B9913 sequence
ctccgaatcgacaagaagggcggatgggtggcaggcgccgagttcgccgccctgcccgcctgacgctcaccccttgcgctgttcctccaccgggtgtggcgctcgcgggttgctgctgccgaagtagtagcccagcaccagccccaggcccatatccagggtccccagcgtccgcatgatgatctcccgcatttccgcgggaaccacatgcgcgagcagccacgcctgaaccacgaaccatcccgcgacgatggcacccg

SEQ ID NO: 35913 - DNA, 260 bp, Unknown
  Description of Unknown: RightRegion for integrase B9914 sequence
tatccccacaagttatgttatcatcactatccgtttacacttgacataaccttgaggggataagcttcctcatgtaagacaacaggtaggagttgtttcgataacgcctacttgttgtcctaatagttgcagcgcacatttcgtcgcactccccggataacatctgccattatcgtatctgtatcgacaatcctttacaatgttcggcacaaaaaaattttaaagggtatctgtacatttgtcaatatatggaatattat

SEQ ID NO: 35914 - DNA, 260 bp, Unknown
  Description of Unknown: RightRegion for integrase B9915 sequence
tttggacgttatttgacgtcgaccgaaggcaggcgaaccgtccgcatttgcgggctggattgagctaggagcggatagcgcagccaccgccaggccagccaatgccggcgccagcttcccgaagaagcaattaaacctaaatgacgaaggttgttgtcagcgtggcccacaggctttcacccatgccgcccacaatcggaacgatgccagccagcagtgcagcgtgatattcgccaggcgcacgacgggcggatgatcct

SEQ ID NO: 35915 - DNA, 260 bp, Unknown
  Description of Unknown: RightRegion for integrase B9916 sequence
ttcaagtcggttagtgggttaggtccttggaccttgtggcttagccgatttgacgtcgcctgaggcgccgtcgacttttcgctggatcgcggtcgccaggagttgcgccaggcccttcagcgcgacctgctgctctggcgtgtagtcgcgctcaggcttgacggggaggcggaccggctcgggctcggacggcacaccgccagtctgcggcgtgccggcgtctaactaaaagactgaagatgcgtccaatgttggcgccg

SEQ ID NO: 35916 - DNA, 260 bp, Unknown
  Description of Unknown: RightRegion for integrase B9917 sequence
tttggacgttatttgccgtcgaccgaaggcaggcgaaccgtccgcatttgcgggctggattgagccagcagcggatggcgcaaccaccgccaggccagccagtgccggcgccagcttcccgaggtggcgatcaggccgaggtggcgcaacgagttattttcgtggcccatacaacccagcccaggccgaccacaggcgccaggatgccagccagcagtgcagcccaatgttgaccagacggacggccggcggatgctcga

SEQ ID NO: 35917 - DNA, 260 bp, Unknown
  Description of Unknown: RightRegion for integrase B9918 sequence
attgccaaggatgttctgaaggaatgtgtgtgggatggggatacgctttttcttacgctttaattttcccttttttattttgataccctctcccctcagaatgaaaaagagaaaaaataagagggaggccaaccggtctccctctcttcatgcttatttgcagatgcagacattgattttcttatctgctgccgcttttactgccgcctctgcttcctcctgagaagcgcattcctgggcaacctggatgtagcccggaa

SEQ ID NO: 35918 - DNA, 60 bp, Unknown
  Description of Unknown: RightRegion for integrase B9919 sequence
atgtgtttgacccttacagctatctggacaggaacgggcagtttgccggcatcgacgtgg

SEQ ID NO: 35919 - DNA, 260 bp, Unknown
  Description of Unknown: RightRegion for integrase B9920 sequence
attatcaatggtgggctactttgcttcagcctgccgaggcaaaaaaagaaccgagcggaataacccgctcggttctttttttctctattcttttgtgtctgcgggtgcagtctatataactgcttccattttggaaacagttgctaccccgcgtaggtacgcaagtcttcgactgcacgcggcacctgtcgcttattcgttctgagtttcgttagcctcgattatttcaacgggcggctcgtgatctgaatctatcttgt

SEQ ID NO: 35920 - DNA, 260 bp, Unknown
  Description of Unknown: RightRegion for integrase B9921 sequence
gcgacgatcttcttcgtcggcccggtgttcgtgctggccatgccgctcccagaaaagcggtaaacgaaataaggcaccttgcctcttgtgggcagggtgccttttcttctgccatcattttcgtggcatcacgaaaatggtcaagcccggaggtcattcctccgggctttttgcttcctccggctccggctcgatcagatcctcgatgtggcagtcgagggcctttgcgaccttctgcagaacgtaaacgtcgcggggtg

SEQ ID NO: 35921 - DNA, 62 bp, Unknown
  Description of Unknown: RightRegion for integrase B9922 sequence
aggaggatgcatgacccatggtcgatcatatgctcgtgcgtggcgcaaaggtccacaacctg

SEQ ID NO: 35922 - DNA, 62 bp, Unknown
  Description of Unknown: RightRegion for integrase B9923 sequence
accgcgttgcggttggtggaggcgatgggagtcgaacccatgtccgaaaagagttcagcgta

SEQ ID NO: 35923 - DNA, 260 bp, Unknown
  Description of Unknown: RightRegion for integrase B9924 sequence
accatacccttcatcagctcacattcaaccggctcacatgcaccgcaccctgctcagccgtgatatacgtcccctcagagtacatccgccaatgccaccaccccggcgcgtcaaaagtcacatcaagataatattccccagtgtccgaccgctcagccgccgtttcctccgtattcccttctggatccattacctcaaccaccacactcccaggatctacggctgtgccgtcatcatccgtgaacgttcccttaagacgc

SEQ ID NO: 35924 - DNA, 59 bp, Unknown
  Description of Unknown: RightRegion for integrase B9925 sequence
tcagcttttggtctcacagtaagcactccgctgaactggattacttactgccagcctat

SEQ ID NO: 35925 - DNA, 260 bp, Unknown
  Description of Unknown: RightRegion for integrase B9926 sequence
agaaattctattgagtttactgctcaggggtttgtcattatctggtatttcagtgaaaaatgacaatcggcagcgatgctatgcggcatcgctgcttttgttgtctatgccaagtcctgccaaattctgtaaaatcccgtcattgtcttgatgttatatatattatccgaattatcagactttttcgacagaatctgataagattttacatcaaggaggacaatggcatggggcgaatcaggatcaggatcggcaagctg

SEQ ID NO: 35926 - DNA, 260 bp, Unknown
  Description of Unknown: RightRegion for integrase B9927 sequence
agcaagaaccgccttaagtgcttgattttgcagttgccggactgggccaggaaggcggcgtgacatgatccggccacgttttgcacgctatttttctgtaggctggcgccatgggtaagccacgcctggagccgcttgattctgtcgatttccgctgtaataagtgcgggcataagtttacggctgcgccggatcctgacgggattgaagattaccccactgatgactggcaccccttcctgtatacccacgattgcgtc

SEQ ID NO: 35927 - DNA, 62 bp, Unknown
  Description of Unknown: RightRegion for integrase B9928 sequence
ttgcagattgttcgggaggtcatcatcaagggtgacggcacctggaccattctgccggtcta

SEQ ID NO: 35928 - DNA, 260 bp, Unknown
  Description of Unknown: RightRegion for integrase B9929 sequence
ggatgcgtgtttatcaggaaaaaggatgaactgcctaagtctaaacgtaaaccattgtgttgaaatgaaagaaaacgaaaatttcatatcttaaccaaacgggcggcgggcaaaaacctgccgcccgatttgagtttcttctaacagtatcgcgcgtgcgcgtgcgagggtcaagtcttactctttctggtgaatgaaattcataaaaaaaatccaaaaactaacgagttcccgggctcacagcgaccgcgtagagagaa

SEQ ID NO: 35929 - DNA, 260 bp, Unknown
  Description of Unknown: RightRegion for integrase B9930 sequence
acaattatattattttttgtgggcggtttgttcggcttatcagtaaaaacccgcgaggcgtgacgcttcgcgggttttgttttacttaatcttgctataaagcatttttacaaagttttcaccggctccgccggtttctttgtagccccaggccttttgtaacgccttaactgcattgatcgcgctgtcgtcataaacctttgactcggtgacgttgacgctatgcagctttttattataggcaagccggagcatttcct

SEQ ID NO: 35930 - DNA, 260 bp, Unknown
  Description of Unknown: RightRegion for integrase B9931 sequence
tttatcttcgtgaacggggttttcggtatcgtgcttgaaagacaagaagaacagggcgaatgaatttcgccctgttcttttgattgttcgtgttttttgctcaaaacaagcccgctgcgcagctgatccgttccggatcgcatccggatcgcgtcaaaattcccgaacaatcagaatcgacgaatgaagttttattgattgttttcgtcgtcgggtttgtcctggctttttttgacttcagaaccgtcgtcattcccctt

SEQ ID NO: 35931 - DNA, 260 bp, Unknown
  Description of Unknown: RightRegion for integrase B9932 sequence
cgtgctcgcgggaccgcgcgcgggcgggcaggcgctcgtgctgctgctcggggaactgaatgaggtttcccgtcctctgcgactctggggcgaacttgccgttgtagaacatgcggacggtcgcttccatcgcttcttccatgagggatgcgcggcgttcctcgaactcggcgcgcagtgcttcccgttcggtcaccaggcgggcggcgagggctgcgcgttcggctgccgtgtctctgacgaggcggccttgttcgttt

SEQ ID NO: 35932 - DNA, 260 bp, Unknown
  Description of Unknown: RightRegion for integrase B9933 sequence
gaatttttgcaactatatatgtacaaaaatattgcatatcaaatatttactatacaacaataatatttaaatattgttgtatgaatatatatgctataataaaagacgtgtcgataaatctcaccatttcatgatgttttaattaagtctgctaaacaagcagacttttcttttttcccgtttctattaactgtttaactttttcttttgcatcgtctaaatttttacaaccgtctaatatcacagaaaacattttaaga

SEQ ID NO: 35933 - DNA, 260 bp, Unknown
  Description of Unknown: RightRegion for integrase B9934 sequence
accgtgatcttcttcctcggttccgtgttcgtgctgtcaatgtcgattccgacagaattctaacaatccacaccagactgacaccgtttcgcgcggtgtcagttttctttttcgtctctccgaaaaacttttcaaaaattctaatgataaagatatgatattataatatcagaaagaagaacaacacctactgagaacgaggaggaaattaaaatgaaaatttggtatgccgttatgatgaacaacgaggataacgattg

SEQ ID NO: 35934 - DNA, 260 bp, Unknown
  Description of Unknown: RightRegion for integrase B9935 sequence
gaacacccgattgtgtggtttagccatgtgtttgcaataacagtaaaaatcccgcaagagtaatcttgcgggatttttctatgcttttgtgtagccctcatgcgtagagcgtagcggtggggtttttgaggaagtcagccagcggctttgcgtccatccaaccgctgatattccagaggctgtaccgggttccatcctctctctcaaagtggacggacaaacccttacgaacgaagcgggcaacgccaacaatccgctta

SEQ ID NO: 35935 - DNA, 260 bp, Unknown
  Description of Unknown: RightRegion for integrase B9936 sequence
aagaaatttcaacgagacaatgcaaacttcaaactgaagatatacccgaagctccctgtttgacagggggcttttaccgttatcctatatggggctatacattatcccatatatgctaatggttatttatttaccgcttaaattcgtgtttagttcacaaaaaaagcaccctatcatcattgagtgcttttaatttgtttattctttttttaccgaagattcattataactttttcctctaccataattacttctcgtac

SEQ ID NO: 35936 - DNA, 260 bp, Unknown
  Description of Unknown: RightRegion for integrase B9937 sequence
acctggtcgatcagcatgatcaagggggtgttcgtcttgactgtttattgcagtatcagataattcaaaagccagggttggacgacaatcgtcttgccctggcttttcctgtttacaactttttaataacgcattgggttagattctaacaaaatccagcggaaaaattccagatttgctatcatggctgtaaaggggtatagctatgattaggattcacttgtccgcccttctcggcaagaagcggtggacgcaggcaa

SEQ ID NO: 35937 - DNA, 260 bp, Unknown
  Description of Unknown: RightRegion for integrase B9938 sequence
gaggttatatctactggaaatgaaatatggggtgggggtttgtggtcactacgcagaatctaaaggagttgttgttcttataatggatgatcataaaaaatctgctaagggaggtttaaatccattatttgaaagccttgaaaaagctaagataattgattttcattcaggagaacaaccaaaacatatttccaaagaagatcttcgtataaattacgataacaaaaagtttttgttctggggaaatagtaaattaccct

SEQ ID NO: 35938 - DNA, 260 bp, Unknown
  Description of Unknown: RightRegion for integrase B9939 sequence
aaaagagatataaacgtaaaacctgtaggagcaacacctacaggtttattatttcttcagtaatataatctgataattcaagcatattattgatttcttgctcttctttttctatgatagatctcaagttatccatttctactaagccatttatcccaagttcagatgctctttccaaaatggattctaatttttttctcaataacttgtacctccataatttgatgatgatcaagaaacgataaagaaatttatgctgc

SEQ ID NO: 35939 - DNA, 260 bp, Unknown
  Description of Unknown: RightRegion for integrase B9940 sequence
aaaaaagatataaacgcaaaacctgtaggtgctattcctacaggtttattatttcttcagtaatataatctgataattcaagcatattattgatttcttgctcttctttttctatgatagatcccaagttatccatttctactaagccctttatcccaagttcagctgctctttccaaaatagattctaatttttttctcaataacttgtacctccataatttgatgatggtcaagaaacgataaatgaatttatgttgc

SEQ ID NO: 35940 - DNA, 260 bp, Unknown
  Description of Unknown: RightRegion for integrase B9941 sequence
aaaactaacggcactttgtggaatgaaccggaaatcgaacttgatatatatttgaaggtataatttttttgttttttatatccatcattgatgcgctagttcatccgcacattgatgatggatataatcaagaagcctatccgcgcggcgttttgctctttttactatttccaaattccggaaactatgataatataatcgcaaaaaccggagggaaaagaatatgggctttttaaaatctttgatggatctgttttcta

SEQ ID NO: 35941 - DNA, 62 bp, Unknown
  Description of Unknown: RightRegion for integrase B9942 sequence
ggctttttcccatttcataagcattttgcattgtccttctttgctttatacatctatcgtta

SEQ ID NO: 35942 - DNA, 260 bp, Unknown
  Description of Unknown: RightRegion for integrase B9943 sequence
gtggcagacctcgtgctccagggcgcgggcgagatcggcaggcgcgcgggcgagccgcgctgaggcatcgcaggcagcacgaaagcgcccctccctggactccatcactggagctcggggaggggcgctttgtcgtgcggtcaggcggcgagcttggcgatcaggtcggggcggaagccgctccagttctggtcgccggccacgacgacgggcgtctgctggtggcccagggagaccgcgtaggcgagggcgctggggct

SEQ ID NO: 35943 - DNA, 260 bp, Unknown
  Description of Unknown: RightRegion for integrase B9944 sequence
gacccatcgacaccgacaccgcccgagcgcgtgcctctcgcgccgcagagcccctcggcatgacggccacgatcatcaccagtcccctgtaccgggtccaggtcggccacggttgtgggttcgtcgcggagcagcccgtcgccccggagccggtccgccgccccgcgcgggtcgcggtcatgttggcgctcgcgcatcagctccaggcgcggatcaccgagggccgagtctgcgaccaggccgaggtcgcccgccggctc

SEQ ID NO: 35944 - DNA, 175 bp, Unknown
  Description of Unknown: RightRegion for integrase B9945 sequence
tccacgatacaggagatttacctaaatgatgacaatacgattaaagctgtagattttttataatctgttttgtactaagtgtttagccccatttggagccgacaaaacgatgactgctgtactttctggtgaagcagatatcggatttatggggtcggaagcttccatttacacg

SEQ ID NO: 35945 - DNA, 260 bp, Unknown
  Description of Unknown: RightRegion for integrase B9946 sequence
ctcaataggtcaagtttttttattgacctattgagaattaacaattttttatgcgagaagtgaaggcttccgtatgcttacaggaatgtaagtgtacggaagccttttttgttgcccgaaaaaggaaggaggagcacatggcagattattctataccagagcttttgaagctgatcgaagcggataccatatacattcccaagagcgttgctcggcgtgatgatatttatggtgcaagcaagacattgttcggcgttgta

SEQ ID NO: 35946 - DNA, 260 bp, Unknown
  Description of Unknown: RightRegion for integrase B9947 sequence
acccccgtgggggcatctctctataggcaaacattctcatatccgttatcctctaaaatttgatctgaatccaatcaaacattcagcctggaacttcttgtattcctgttgaaccataccgcagttagcgaataaagataactgctactgctggcatttttggaaataacttccatgcggaggagatgccgtccagaataggcaatgttcagttctgccgttttcacggtgttgcgaaccaacgatgcgttataccaatc

SEQ ID NO: 35947 - DNA, 260 bp, Unknown
  Description of Unknown: RightRegion for integrase B9948 sequence
gccgcctcgaagcatacattgacattgagcgacaaggacattgcggcatttgtgaccaaataaaaaatcaactcctttcaagcgaaagcccctcggattgtgaggggcttttctatttagtgagcattgaaagttctataggttcaagtgtcgccgcgaatgctttgagcatgcacagagtatcgagtttgttgggaggctcggatggcgcgggtattgtaattacatcccgataaacggctccaatgcttttgtcctca

SEQ ID NO: 35948 - DNA, 260 bp, Unknown
  Description of Unknown: RightRegion for integrase B9949 sequence
tatcttaaagaagaaattcaagaaataattaaccataaagaagatttaacaaagattgcttgaaagcgtatagggctagtaactaaaaaattaattctaaagaaaagagaaaagcgcccataattaaatataaaagaattttaaaaccctgaaggaattcagggttttttgtcaaacttatatattgtgggcaatagttcataattctaaacaataaaaatttaataaaatttcaggtatatttaattttaatatggtat

SEQ ID NO: 35949 - DNA, 260 bp, Unknown
  Description of Unknown: RightRegion for integrase B9950 sequence
ccttttacgtacgcatggagggatgatttccgaactaatcttgaacggtggatgtgtgcttaacgtgcttttttccgttctcacggctggcccgtttctttgcctcacttgtggattttccacctttgcggcccaggattacggcggcctcattaaaagatattttgtttgatttttcaacctcttttttgaatgggtaaatattgctttccagacattttcgataatattcccgcatccaatcaggagttgattcgttg

SEQ ID NO: 35950 - DNA, 260 bp, Unknown
  Description of Unknown: RightRegion for integrase B9951 sequence
aaggaaacacctgattccaaaatttcaattcatattcattataaaactaagtttaagatttgaagacacaaaatgaaaaagctataggaattaacctacagctttttcattttctatattattttttattttgtttcttttttctatttctcttagaatgactctagctgaagcttctctgtataatctctcaccttctgcaacactttcaggatcatatacataacttcgtgtaatttctactatcatctatttttctc

SEQ ID NO: 35951 - DNA, 260 bp, Unknown
  Description of Unknown: RightRegion for integrase B9952 sequence
ctagcgggtttcgatttaaccacaggtagtcctgcgcgtctctggcttcccttaaatctctgaaaacacgcgactttgttgcagttaaatccatgctcgaaaggagaagtccccatgaaggaaatcgatgatctggtcgctcaggtgaaggccagcgatgacgccgtggattccgccacgcttttggtgaacggagtcgcagcgcgcatcgatgcggcggtcgcagcggcagccagcctctcgcccgctgacaaggcgaa

SEQ ID NO: 35952 - DNA, 260 bp, Unknown
  Description of Unknown: RightRegion for integrase B9953 sequence
tcgtggacggaagaaatgaaagaagaagcaagaagaagggggttattaaattattatgcctaaagtaactaaaatagaagctactataaatccaaaaacaagactgccaaagaatcaattaacaaaaagaaaagttgcagcctatgctcgagtatcaaccgatagcgatgaacaagccacatcctattcagctcaagttgattattatagtcgctatattaaatctagacctgattgggagtttgttgatgtttataccg

SEQ ID NO: 35953 - DNA, 260 bp, Unknown
  Description of Unknown: RightRegion for integrase B9954 sequence
cactgtagattgaagtcccattcccagaagcgattctgggattatgacaccttcgtggtgtagtccagggaaatccaccctgcgccagatttcagcttaccccactttgttgcgccctgcccagtactttcctgcacgatggtataaactccaccgtcacggatagtgcctgccagagcatagttcgtacctgcacccttacggatattcaaaaccgaaactgtaactttcactctatacggagagaacgtaggcttgct

SEQ ID NO: 35954 - DNA, 260 bp, Unknown
  Description of Unknown: RightRegion for integrase B9955 sequence
cgcccgtattatatctttcttcggggtatgctgggccttgttcttgtccgatccattgattagatatgagcgctgcgattgctttggcggtttccatccgggccttccgcctcttctttttctttcccatcggcctttccctcctttcgtttattgtttcccttggaacgattatattaaaaaagcgccccggaatcagctcccggggcatcgttattttagcattttaccatccgttaaaataacggaatccatatttt

SEQ ID NO: 35955 - DNA, 260 bp, Unknown
  Description of Unknown: RightRegion for integrase B9956 sequence
agttcgaacctactctactcccagtcaattaataatattttaactataaatcaaaatggataatcatgatttaacttcagaagagtggaacggtttcggtaaactaggactaaatcttttaatttcagcaatagtactaataagcctatgttcgtccagtttattcctactttcacgtattatatttaaatgataatatggaaaataaattagaggatggttatcgatacgatgattatcctgaagatcctgataatatg

SEQ ID NO: 35956 - DNA, 260 bp, Unknown
  Description of Unknown: RightRegion for integrase B9957 sequence
tacattttcgtaaacggcgtattcgggatcgtgcttgaaaggacagaagaacagggcgagtgatacccgccctgttcttcatttttcgttaatgttcgtgttttggtcaaaaaacagcgctgctgcagctgcaccgtgcgcccggatcgtgaccagggaacctataaaacccgaacattcagagctgccggcagtcgtcaatgttcgtctttcggtttttcttcttcgtttttttcttttttctgctgcggttcgtcgcc

SEQ ID NO: 35957 - DNA, 61 bp, Unknown
  Description of Unknown: RightRegion for integrase B9958 sequence
atcaaaaacacaaaaaaggcgcatttcccagaattatttgcacggctgagcccctccggtg

SEQ ID NO: 35958 - DNA, 260 bp, Unknown
  Description of Unknown: RightRegion for integrase B9959 sequence
acctatacaaccaatcatcgcgatataaatcacttttcactgcaaagaggattatcttcataaatatcctctcttttttctatttcatctaaatatttttggtactcttcagggtgttcttcaacatattttacaataagtggcatcagtgcttcaaaattgttaatcatagatcacaatccgagtagttcttttttcttagctttaaattcatcttcagttataattccatcatcaaatagttgtttaaattttctaag

SEQ ID NO: 35959 - DNA, 88 bp, Unknown
  Description of Unknown: RightRegion for integrase B9960 sequence
gataacttcgagatctcccttttccctagagtcccaaagcaaattaacatcagtacatcataaccgatagctatgatgtactgaatct

SEQ ID NO: 35960 - DNA, 260 bp, Unknown
  Description of Unknown: RightRegion for integrase B9961 sequence
aaaggccatcagtcttcaatatttaaattaaaaccttacttcaatttcaattttattgcataacaaaatccccttttagggggtttttgcttaaccacataagttccgtttcatcggcactgatcaaggcgaagcggcccgctttaaaattgccttcttgtgaaagcgacagcaagtgccataaaaatttttcatcgcattttaacatttcttggaattccatgatcccccggttagcgatattcagttccccgtcaaaa

SEQ ID NO: 35961 - DNA, 260 bp, Unknown
  Description of Unknown: RightRegion for integrase B9962 sequence
ggccatgccccggtggcggagcggatggccgtgtaccgggagacgctacccgctgctgagtaggcgcgtctcctcgtccggtggtgtggcggccgtgatgcacggggacggctcggccgatggcgtcggcggaaggctctccggctggccgggcggcggcctttccgacggggtggctgcctccgccagccccggaccgtctgcgggagaaccgtcagggtgcggtgaggcgatgtagctgggaggggcctcttcggtcg

SEQ ID NO: 35962 - DNA, 260 bp, Unknown
  Description of Unknown: RightRegion for integrase B9963 sequence
atgccaagacatacgcaatctcgtaacaccccacgctttgaaatatcggctattgtaaaataggagagagatgctcatgttttatgatttaagccgccgggtcctcatcttcgtgattgcgttgtttttaatactggcgatgctatacctgattgccatcgagctgggctggatataaaagaaaaacggggaggggcataagcccctcccccagacttgttgatttattttgcgcaaaataattattgcgccggcggacc

SEQ ID NO: 35963 - DNA, 260 bp, Unknown
  Description of Unknown: RightRegion for integrase B9964 sequence
gtcaaacccgaaccgcgttacatcttcgttcgtggcatgatcgggatcgtcatcaccagatgacaaaaagagccggagcgcatgccccggctttttcgcgcacgaaaaaagcggggcacccgccccgcaatggctcagaatctccgcccgatgcactcgctgacgctgatcccctccgcggctgccgccttgcggatcctgtccgccacgtccgcggggagggagatgtgcaggtgggccagctcgccctcggagacctc

SEQ ID NO: 35964 - DNA, 260 bp, Unknown
  Description of Unknown: RightRegion for integrase B9965 sequence
ctctactgctatatttttgtagatggacgcgtcggaattgttgtgaaacgaccggaagtataaccggacataagaaaaagccgtcgcttcgcgcgacggcttttctcgtgcgactgtttccgctttggaaacagttcgttatacctttttcagattcgacgctttgacggcggcggtgacggtctttccgataccgatgacgacgcggtcgcctttgacctcgatgacatcgtacttgtcataatagaccttgaacttct

SEQ ID NO: 35965 - DNA, 260 bp, Unknown
  Description of Unknown: RightRegion for integrase B9966 sequence
cgacgagggcgattctacatcctgcagcgcggcaggatcatcgtggccgtggtcgatatatgagaaaagaggcggaattgatccgcctctttctctatgccttagatgtgaaatcgagggcgatccatctcggcgacttctttgtggagcttttcagctttccccatgtatatccgccggcttcctttacttctataatcgtatagactcccggctttatgaatgtgcttccgctcactttcactttgctgtagttcgtt

SEQ ID NO: 35966 - DNA, 260 bp, Unknown
  Description of Unknown: RightRegion for integrase B9967 sequence
gagccgaagcccgcgccggtgtgcgtgacggcgccggtggagacgctgcccgccgccgcgtagcccacctcacagggacccccacctggtcatccgggttgggggtccctgtgtgtaacggcgtggctcgcaccggcgatcagatcatcgtgtaacgtcgtacccgaatcaggtacaacgttcgagagtcaagggagtgtgatcacagtgggagtactcgaccggcgcgacgtcgcacggttgcgcggcgtcaaggcggg

SEQ ID NO: 35967 - DNA, 260 bp, Unknown
  Description of Unknown: RightRegion for integrase B9968 sequence
atgaaaaatcgtaataatgtagcttttacaatatcacaaattaaaactattataaatatctagtaatcatattttcatattttcatactttcatattttcatactttcatatttttttttatttttatttttattttttatttgttagttataatcaaaattaaacctgtttatataataagtaataagtaataagtaattctagatactaaacttataatggatgaaatagaaacagctattttagtattaataattgt

SEQ ID NO: 35968 - DNA, 260 bp, Unknown
  Description of Unknown: RightRegion for integrase B9969 sequence
gatggaaaggaagtgaccttcatgctcggcggcggcttggaaatagcagaaacacttaactaaacacaacgcgccaccgtgggaaactgcggtggcttctttttcaacttttcacggaagacattttcaaaacttacttatggcggaacgactttttagaaacactccgtctctccaagtttacgtttatagtaccaaagatgcaaatggtaatacattagtggctggtattaatgatattcggtccatgcaagttatac

SEQ ID NO: 35969 - DNA, 260 bp, Unknown
  Description of Unknown: RightRegion for integrase B9970 sequence
tcttacaggcgagagtctctgctctttcagcctgatgctgttgtttattatacactgctgtgattttcttgcaagagcgcgttaaaaaaagccccggctttcgcgagggctttcttgctaattcgaattagggccagcgaatgatatcgatcgtattgtcactcttcagcttggcttcctcctgggcttttaccttaggggggtgccttttgtaccagcgtgaccaccatagcctccttattctccacaggaatgatcct

SEQ ID NO: 35970 - DNA, 128 bp, Unknown
  Description of Unknown: RightRegion for integrase B9971 sequence
tttgtcaaaggatttttcgttttgataacagatttctccgggaaaatgcaaaaagagacctgaaacgggtctcttttgttttgtctcttccaaaatcggggtttgaaatccgaaaaacgtgctttctt

SEQ ID NO: 35971 - DNA, 260 bp, Unknown
  Description of Unknown: RightRegion for integrase B9972 sequence
gaaagaataaataaaaaagattttaagattcgtattactccatctttttattctcatgagtaggcaaacatctcattatgcacacactcataagaataaaattggttaaaaaattaaccagcaattaagctggtttttcttctttctttaataataatttgcctaatgctctatagtacttttgatatgtttcttctgtaggaggttctataggtggataaatttcaatggtacattcaccgttttttattatttctatt

SEQ ID NO: 35972 - DNA, 260 bp, Unknown
  Description of Unknown: RightRegion for integrase B9973 sequence
tatgaaatggtaccactagtgcgagacggtccgcccctattttccaagctgctggcggcctagccgacagctcgctagggagcgcacagagcggagcttgaggtttgcctccccgaggcattcggtcgcgtcgagatacgccctggcgaggtctccgttcgtctgaagcgatcgttccgggacgacacactccgccgtcagcgagtcagggatcggaggacaggtctcgacgatcaccgagcgcccagcgcacccggtca

SEQ ID NO: 35973 - DNA, 260 bp, Unknown
  Description of Unknown: RightRegion for integrase B9974 sequence
tatgaaatggtaccacttgttcgaggcggtccgccgttattttccaagctgctcgcggcctagccgacagctcgccagggagcgcacagagcggagcttgaggtttgcctcgttgaggcattcggtcgcgtcaaggtaagccctggcgaggtctccgtttgtctggagcgatcgctccgggacgacacactctgccgtcaggtagtcagggatcggcgggcacgtctcgacgatcaccgagcgaccagcgcacccggtca

SEQ ID NO: 35974 - DNA, 260 bp, Unknown
  Description of Unknown: RightRegion for integrase B9975 sequence
ctcgtggatgtcaccccggtgtgggagccgtgcgattgcgtggcctgcgagcgggtgcgctgatccggatcgttccgtatcgttccgtcttgttcagttccgttcacctttggcgaaaccgcaggtcacagcgagtgtcctttacagaagacgcgagtcgggaagtttcgtaaaacaagtctgcgcgagtcctacgccaagggcgagctggacgtgacgaccctggacggctagggcccgatccgcccggaagatgtgag

SEQ ID NO: 35975 - DNA, 260 bp, Unknown
  Description of Unknown: RightRegion for integrase B9976 sequence
tatgaaatggtaccacttgttcgaggcggtccgcccttattttcgaagctgctcgcggcctagcctacagctcgccagggagcgcacagagcggagcttgaggttcgcctcgtcgaggcattcggtcgcatcgaggtacgccctggcgaggtctccgttcgtctggagcgatcgttccgggacgacacattcggacgtcaggtagtcagggatcggcgggcacgtctcgacgatcaccgagcgaccagcgcacccggtca

SEQ ID NO: 35976 - DNA, 260 bp, Unknown
  Description of Unknown: RightRegion for integrase B9977 sequence
agagccttaatcagaaaagtgcaagtcacagctgatagcattgtcatcaagtggagaatatagagagagttttactatccctcatttcaatcaaggatactaaaattctttactagaaaatactttcagagcaaacaaaaaaaccgcaagcaaatgcctgcggttttagtgtaattaaattctgaaagcctttatatgctttatttttattttgctgtaatgagcccgtcaggctctacagtaaatgactctttatctgc

SEQ ID NO: 35977 - DNA, 260 bp, Unknown
  Description of Unknown: RightRegion for integrase B9978 sequence
atgagagagcaagtgcgacagaataatttgaaaaggagaaatcaagaatggcaaaagcagtaacggtcatacctgcaaagataaacccactgacaaagctacccacactttcgttagcaaagcgaagaacttgtggatatgcgagggtttcaacagataaagacgaacagttcacttcgtatgaagcacaggttgattactataccaaatttataaaagctaaccacgactgggaattcgtaaaggtgtacacggacgaa

SEQ ID NO: 35978 - DNA, 260 bp, Unknown
  Description of Unknown: RightRegion for integrase B9979 sequence
cccgaaaatattttgatgttggaaaaattttcaacgctaaaaaaagattttcttgttgcataaaatttttcaaaattttcaaacgacgaaaattcaaaaatttctctcaaaaatttttattcaaaaactcaatagtaataatggtttttgtaaatttttgtaataatatttttattgccgaaaaatcaatggcaattccccgaatgttcaatgaaaataattgaaagaggtttgagcattgccgaaaaaatcgtcgattt

SEQ ID NO: 35979 - DNA, 260 bp, Unknown
  Description of Unknown: RightRegion for integrase B9980 sequence
tatataggattggtagcgggggcctgcttcggttccaatatacgggagatcaggatcagctaggtggccggacgcatttcagcggtagaacggccagctcgcctgcaggccagtaacggccgaggcctgcaagtcttagctgtctcacttttccccgcttgcctcacggaacgaactcggctgtattgctattgccggcaggcagagatgccagatcagcgcgcttggtgaaggttgggcctgccgttacgtcataaagt

SEQ ID NO: 35980 - DNA, 260 bp, Unknown
  Description of Unknown: RightRegion for integrase B9981 sequence
cgtgggcggatccccggcggggggtacttcgatagcgacagcgttgaaatcacctggaagtagcggggccgaaaagcggaccgaccgccgacgcctggggggcaagtcggcggccggccgtttgtggggggcggttcacacccttgacacgttgctcacgtggagcaaggtcatccgtacggcttcacctatgtgagtggcatgtctccccgggatgagcacaaacgttcaagctagatccacaaatgtacggtcgacga

SEQ ID NO: 35981 - DNA, 260 bp, Unknown
  Description of Unknown: RightRegion for integrase B9982 sequence
aaagaggatttccgtcttgtacccgctgcccagtacagagggtacaaaagcaaccgggaatgacgaggctaagaaacgagtagccgcctactgccgggtatcctcaggcagtgaggaacagcttggcagcttaaatgcccagaccagttactatgaaaagtatataaacgataatcccgattatctctttgccggcatctataccgatgaagggatctccggcactgacctgaagaagcgggaagcattcaacggattaa

SEQ ID NO: 35982 - DNA, 260 bp, Unknown
  Description of Unknown: RightRegion for integrase B9983 sequence
gaggacaggttcagcgtaacttttaaatcagagattagtgtggatattgaaagggcatcgtaaaagccaaaagaatgtgagcatttgaaatgttacaaaactcagcctagggggggggggaaatcctctctaggctgtttttatgctaaactcaagctattaagcaaacgtaaaccttttaacgatagccttttcctatcgttaaaaagtgcacccactatccatagtgtgcactcaaaaaagtgtagctatactacctg

SEQ ID NO: 35983 - DNA, 260 bp, Unknown
  Description of Unknown: RightRegion for integrase B9984 sequence
accacaatcaccatgatttcaggcgtgtttgtgctgaccgtcgccttcatatcccgcaattgagtgaatgagcaaagatagaccagagatggttgtctttgctctttttcgttcttcgcttctgttttccaaaaatcgacgcaatttccatatttcggatggctcatacgaaaatccgaggtttcacgacagattcaagcggggcctgtaaaattatgctatactgctaccgaaaggagtataggttatgatcaggatca

SEQ ID NO: 35984 - DNA, 260 bp, Unknown
  Description of Unknown: RightRegion for integrase B9985 sequence
gagtgcgaggatctggttttttcccgcatttccccggaactgcaattttttgttgccgcgtaaggggaaaattaatattttaattttaaaaggagagaatcatgaaaaaaataatttttactgcatgtatcgcattgtttttcattgcggggtgcgagtatttcgaagaagatactttcaccgtgtattacctggtttccggcgagacgcaaaacgcagaaattcgttatcttgacgaagatgaaacagaacaggccata

SEQ ID NO: 35985 - DNA, 260 bp, Unknown
  Description of Unknown: RightRegion for integrase B9986 sequence
gtcttagatgacacaatatgtcaaataacattccaaaataacaagactatatttttccaatagcgcatgaatttttggtcgttttatgacattcgggtagttagctgatggcagaatgtcatttttgagcaatttttcttccatctggataaagaaaaaagccccaaaacacgggactttcagacatatttaacacaatgggcaactctcacagtatcagcatcgcatcccctaattgcatgctgtgcagaatcaggggt

SEQ ID NO: 35986 - DNA, 260 bp, Unknown
  Description of Unknown: RightRegion for integrase B9987 sequence
ctgagcctcgtcctcttcccccgcgtcccctcggctggggatggggatggatccgggttttagtggtggaataagtggtagcatggtgtgaaagatgattctttcatatcatgctaccatttatcgaacaatttaaatattacgaaaggatgacgtatatgtacaacgaattcagactcgatatgctatgcgaattggtcgatgcaggcattgacgacgacatgatgcgcaagatcatcgaggtggtggaccgggtcggc

SEQ ID NO: 35987 - DNA, 260 bp, Unknown
  Description of Unknown: RightRegion for integrase B9988 sequence
aagccgggaatcggaagatatgtggaaaatgtgttcaatcttgatatttttttgcgcctttaatatccaacataaaggcgcaagttcataggcgcattgatgttggaaatcacaaaaacattgatataaaggggatttctaatcatgacgaaaatcgaaaaactaaacaagctgctattatcaggaattatcacaaaagaagaatatgatgaacaaattgaaaagtatctgaaccacttcttctatctatttgaaatcgg

SEQ ID NO: 35988 - DNA, 260 bp, Unknown
  Description of Unknown: RightRegion for integrase B9989 sequence
agtgaagagaaaaggcaaaaacaaagggagatgattacatgcaggctacaggagcaaaaataacagtaagaccagcaacaattgggaggtactcaactataccaactaatctggcttacaaaaagcgagtcgcggcttatgccagggtatcaacagatactgaagaacagcaatcaagctacgatgctcaggtcaagcactactcaaagtttataaaggagaatgttgcttgggagtttgtagaggtgtatgccgacgag

SEQ ID NO: 35989 - DNA, 260 bp, Unknown
  Description of Unknown: RightRegion for integrase B9990 sequence
ggtgcaaatagccgtggttggacgcagccaacaccggaaatcaatattgaattaaaattttagctgtttcagaaacggcttatttattggcttttccccatgggtatctttgacgtactatctcatgcgcacgttaatgatacccatgggaatattcccttatgcaatctcattatatcaaaatattggaagattgcaatacaataggcaggtggaaaaccatctgcctatttctttattcagctttcacgataatagca

SEQ ID NO: 35990 - DNA, 260 bp, Unknown
  Description of Unknown: RightRegion for integrase B9991 sequence
ccccgtcgttcgggtagcttagcgcggtgcgccgtgccggcgcgggagggttcaaaagcatgagctaccgacgcgccagaatccccattcgcgtcctccaagtcctcacccttctcgtcggtgtcatctccgcgctgatgatgctcgcggcgggcgggctcgctttcagcgaaggtcccggccagggcgctgcggggatcgtgggcggggctatagggggtgcggtggccctcctctgcgccggggtctccgcggctttc

SEQ ID NO: 35991 - DNA, 260 bp, Unknown
  Description of Unknown: RightRegion for integrase B9992 sequence
aaaaagagccctgatggcttcaccattgaaatatacccgcgcatcccaaaatccgaaaaatgaaaagagagggccgtttcggtcctctctttcttatagttatcctgtttagccatactcatagggactgcccacgatgtcacccaaaattgctcctaacatggctgtttcctcccttacctatgatgccgcttctggaaatcagcttcgatttgttctttccactctgcgccgatggacgcgcagcagggtgcttcccg

SEQ ID NO: 35992 - DNA, 260 bp, Unknown
  Description of Unknown: RightRegion for integrase B9993 sequence
tataaatcaaaagggaaagaaacagaaaaaactgtgtttgattatcatattgaatggaaataagaaaccgtaggaattaacctacggtttctttaaatatttcgttattatattttatgtcatttcttttcttcaactcttctaaaacaagtttggcaatagtttctttatatatccttttaccctcttgaacgctttcaggatcaggagtacaaccttctgtataagttataatcatctctttcacctcgataatatgt

SEQ ID NO: 35993 - DNA, 260 bp, Unknown
  Description of Unknown: RightRegion for integrase B9994 sequence
aaaaaaagtcctgatggtttcaccatagagatatacccgcgcatcccaaaatccgaaaaatgaaaagagagggccgtttcggtcctctctttcttatagttatcctgtttatccatactcatagggactgcccacgatgtcacccaagattgctcctaacatggctgtttcctcctttacctatgatgccgcttctggaaatcagcttcgatctgctctttccactccgcaccgatggacgcgcagcagggtgcttcccg

SEQ ID NO: 35994 - DNA, 260 bp, Unknown
  Description of Unknown: RightRegion for integrase B9995 sequence
aaaaaaagtcctgatggtttcaccattgagatatacccgcgcatcccaaaatccgaaaaatgaaaagagaggaccgaaacggccctctctttcttatagttatcctgtttagccatactcatagggactgcccacgatgtcacccaagattgctcctaacatggctgtttcctcccttacctatgatgccgcttctggaaatcagcttcgatttgttctttccactctgcaccgatggacgcgcagcagggtgcttcccg

SEQ ID NO: 35995 - DNA, 260 bp, Unknown
  Description of Unknown: RightRegion for integrase B9996 sequence
gttacctgcaactttgagatctgggttacagttgatcggcgaggagggcaaccatctttgtgatagagatgccgcggactttggcttcggcggttctgttccggtcgctactccggatatccatcggatgtgtgtattatatcacaggttggctatcatcccgtccacatacgtcagccgtgccgtgatgtaaactactcctgctccagttctggttcaggtgtgacttcgtgcttgtagcactgatgcatcacaggaaa

SEQ ID NO: 35996 - DNA, 260 bp, Unknown; identical to SEQ ID NO: 35989
  Description of Unknown: RightRegion for integrase B9997 sequence

SEQ ID NO: 35997 - DNA, 62 bp, Unknown
  Description of Unknown: RightRegion for integrase B9998 sequence
cctttgtcctggcaatatttaatcaggtcaagcggcgtgttggagatgtggcagagtacctg

SEQ ID NO: 35998 - DNA, 260 bp, Unknown
  Description of Unknown: RightRegion for integrase B9999 sequence
gcaggtttatactcagttgaatggataaatgagaagaggttggcactaagtttgcatacataaaaatatttccttatgctaccaagggttatcttaagatagcccttttttttgtttctatgcaaaggaaatttagtcaattttgtacgaattcattttacagttttgatgactatgatagcattaaagcacaccaaccatagacacggtcctggtgatgtacgtcgtactagccaggaccaacttttcacaaggaggca

SEQ ID NO: 35999 - DNA, 260 bp, Unknown
  Description of Unknown: RightRegion for integrase B10000 sequence
cgaactattcagatccgcatgatcgctggattcttcgtagcggtggcacgactcgccgaatgacggcaaacgaaaacgccctcccttgatgggagggtgcttttctttgcgctcaggacgcgctctgaggccgctctgctcgtggatgagtatttgttcgtctgtgtgcgcggcgcgtctcagcgcaagccgtgcggtcaggattcgactgttcggagttcttgaacagttgctttttgcgttcattcctcctccgcctc

SEQ ID NO: 36000 - DNA, 260 bp, Unknown
  Description of Unknown: RightRegion for integrase B10001 sequence
acaatacaaaacacacgaatctacgataaagataaaaaactacttggtataaaggaggaatagttatgtctgaaccagttgttaaagttattaaagctaatccatttggtgctaaaaatcttccatcgtttgatgaacatttactaaaagttgcggcatatgcacgtgtttctaccgatagtgaagagcaagaagactcatttgaaagacaagttgattattacactagatttattcaatccaatccaaattggaaactt

SEQ ID NO: 36001 - DNA, 260 bp, Unknown
  Description of Unknown: RightRegion for integrase B10002 sequence
tatacgaaccccgccattgtttcaatatttgctcatgggttcgtgctcaccgttcccgtgtgacgggaaaacaatagaccagacgtatttcggtacgtctggccttttctatgcctgtcgtgcccctccgattccgtatgattcttccggtatttggaattttcttccaaattcaagcgagacgcacaaacctgtgatatattttctttcggagggaacctataatgatccgtattaaactttccacccgtctcggcgaa

SEQ ID NO: 36002 - DNA, 260 bp, Unknown
  Description of Unknown: RightRegion for integrase B10003 sequence
aagggttggcgagataaacagcgcgaacgcttggaaaaagaaaacaaaacggaggtgcaataatgccgattggaacaacaaagatcgtaaaggaaatacctgccttataccaccaaaaaaatacgatagttcccgatagaccgaacgtgacgtattatgcgcgtgtcagtacggagagcgaagaacaggaagactcctacgaacggcaaaaggcatatttcgaagaaaaaataaaagcacatcccgaatggaattatatc

SEQ ID NO: 36003 - DNA, 260 bp, Unknown
  Description of Unknown: RightRegion for integrase B10004 sequence
aaaagccaacaagtgagatattacgacaaagaacaaaaagaacccgccataagtcaccgctaaacactggcggcaactggacaagccctgaaatcacgcttgatgttaaactaagggtttaattatttgtaccttccatatccatcagttgtgcgcatattcaacagcgcgtcactgatggatataaacgctaaaaagacaatggcagcggaaaaagctagtgttttcagtgctttgcgtcgttatacaaaaacattccc

SEQ ID NO: 36004 - DNA, 260 bp, Unknown
  Description of Unknown: RightRegion for integrase B10005 sequence
ctaataaataaagtgataatcaatgaaaaaggggagatcgaaaaattgacatataaattttaattttttagtgtctacagtgataggaagggcgtgccggtataaacagtgtagaaaatacagtacacacaacatgtagatcgcttaacgaaaacatcaactatatattggcctgaaaaattcgtgtttaaccttattctttaaagacattgacattcttatggtgcttattattttttattccacatttgcccattttg

SEQ ID NO: 36005 - DNA, 61 bp, Unknown
  Description of Unknown: RightRegion for integrase B10006 sequence
cgaaagggcggcaccagtgcgcacactggtgcaaaaacatgctggggagagcatgttttta

SEQ ID NO: 36006 - DNA, 260 bp, Unknown
  Description of Unknown: RightRegion for integrase B10007 sequence
caccaccctccctattttgtcctggtccgcgggatgatcggcctggtgatcttccggaaataaaaaaagccgcctgcgtaaagcagacggctccttttttatttctgttcttcctcttcctcatctgagggcggttcttttttcacttccggcacttccgggagtccggtcgcaaggcttgttagaatagacaggacaaaggccacaccactcacagacagcgcacggagccactccacctccgaaaatgccgccccaac

SEQ ID NO: 36007 - DNA, 260 bp, Unknown
  Description of Unknown: RightRegion for integrase B10008 sequence
gattatcgcattttacgcaaccaaagccgaccttctgaatataagaaaacccttgtcatatgacaagggcctttttatttaaatcgttttcgattgtttctaataattcggggaaatttctaatctcgtttgacaccaaagcattcaattgttttccagtacggtgacatacaacttcattactttgtaaataatcgcaaaagataaatttaacccccgctttggcaggcgtttcttctgctaatatcatcatataaaac

SEQ ID NO: 36008 - DNA, 260 bp, Unknown
  Description of Unknown: RightRegion for integrase B10009 sequence
ataattgaaccactcttccagcttctcaacttgttttcagagataaaatcaaaaacagcttagtgttacaaaacagttacatacatgaatttcaactatatacgaccgaaatctaatagaaggaggggttgtagtagccgcaataccataaaaatattgggtattatagctgttttcagcctcctggcgatcgtttctgacgaaaatttttatcaaggaagtgctgttacaactgttacaattacctctcttaatataat

SEQ ID NO: 36009 - DNA, 260 bp, Unknown
  Description of Unknown: RightRegion for integrase B10010 sequence
ccttccggtgtaccaagagtttttgtcacggatcgttatatccgaatcactgtggcaaggtaaacaaagcctcctgatgtaatatcaggaggcttttctcatgctcaatgcttcacaatatcccgccaatagcggcccactttatcatcttcggcatcgccgtcatcaatgaagtcatgggccagagatgcccagatttcgggcttgtcggctccgtgtttgatcatggttttgccgtaatcggaaaacagcatattcat

SEQ ID NO: 36010 - DNA, 260 bp, Unknown
  Description of Unknown: RightRegion for integrase B10011 sequence
tgctcaccttccggtttctccgccggtgcttttttagtaaacttcactcagaattatcgatgagaaatgcctggtcaaaaagggcgtagctcggcgagcgggaatgtctgcgcagatgctttcggacatcatcgcgggaagaaaagtaatcagagcggacatgattccggcactggctgctgcttgctatgtcgagatcccggaactgttcaaagattttgagaaaggagcgtaaggatgaacagaaaacaggaacagag

SEQ ID NO: 36011 - DNA, 260 bp, Unknown
  Description of Unknown: RightRegion for integrase B10012 sequence
accaaatcctacaccaaatccggcagcgacatgcacgtcaccctctaccccctcgcggattgatggttatacatttatttggtacgcatgaatgcgtgccagataaatgttgattgaaagcaagcgaagatccctctccttgtggagagggatcttttttattttaccacgtgctcatagtagcgcagcagtttttcctccgcgcccgggccgtctttatcgagcaggaacgccttggccagagcagcgtagaactccgg

SEQ ID NO: 36012 - DNA, 260 bp, Unknown
  Description of Unknown: RightRegion for integrase B10013 sequence
cgaaccgtagccgtttacatggtcaagggatatttcgtctgtgacatctcgtttgccggataggcaaaaaaagggaccagtcttgattgactggcctctttttcgtgctccaaattaccagatgcggaatattcttccggaaaacggaatattcttccactcagccaccaaagccttccgttttctggtattatccgcgggaaggagcatggtcgaatgatcaagattttactctccatccgcttaggcgaaaagcggtg

SEQ ID NO: 36013 - DNA, 260 bp, Unknown
  Description of Unknown: RightRegion for integrase B10014 sequence
tctaaatcctattccaaagcaggcagcgatatgcgcgtgacgctatatccccttaccgattgattccgtgcgttccactatacttcgctatctactattacacggtacgcatgaatgcgtaccatttaaatgttgattgcaagcaagcaacattccctctccagaccggagagggaattttttattttaccacatgctcatagtattccatgagcttgcgctccggccccgggccgtctttatcgagcagaaacgccttt

SEQ ID NO: 36014 - DNA, 260 bp, Unknown
  Description of Unknown: RightRegion for integrase B10015 sequence
atcgacaaacacactgtagaattccaattcaactgcaacctaaatatcatagaaaaattataggaaccagagcatatcatcctggttcccttttttgcgtcatagatataaaagacttatagattattaataaaattatagtaatgaacaaaaagatgcattatgaaacattttgttcagtaaaaaggctaaatgaaacattttgttcactaaagccttaatatgcaacatttcgtccaccacacacattttttgaaatc

SEQ ID NO: 36015 - DNA, 260 bp, Unknown
  Description of Unknown: RightRegion for integrase B10016 sequence
accaaatcctacaccaaatccggcagcgacatgcacgtcaccctctaccccctcgcggattgatggttatacatttattcggtacgcatgaatgcgtaccagataaatgttgattgaaagcaagcgaagatccctctccttgtggagagggatcttttttattttaccacgtgctcatagtagcgcagcagtttttcctccgcgcccgggccgtctttatcgagcaggaacgccttggccagcgcggcgtagaactccgg

SEQ ID NO: 36016 - DNA, 260 bp, Unknown
  Description of Unknown: RightRegion for integrase B10017 sequence
accaaatcctacaccaaatccggcagcgacatgcacgtcaccctctaccccctcgcagattgatggttgtacatttatttggtacgcatgaatgaatcccatctaaatgtagattctatagcaagcggaaatccctcctggtgacaggagggatttctttattttgcgatatgctcataatacgccatgagcttctgttccggccccgggccgtccttgtcgagcaggaacgccttggccagagcagcgtagaactccgg

SEQ ID NO: 36017 - DNA, 260 bp, Unknown
  Description of Unknown: RightRegion for integrase B10018 sequence
ttgctggttcgaaacataaaaaagccgggcggcctgcataccgtccggcggatgaagaaatagcgaaacacgagaatgtcgccacctacaatataacaaaaaacgcccggggaaagagtaaaaccgggcgtttaacatatccgggcggaggaatagttcccggattcggaatatttataaaaagtttccctctttcatgcattcacgataaacgcgctctatgttctcaatagccagcgccgctttgccgttcctgaagt

SEQ ID NO: 36018 - DNA, 260 bp, Unknown
  Description of Unknown: RightRegion for integrase B10019 sequence
acgaacattttattaattactctaactatttttgcaataaaatttcgtataccacgcaaataatttttacagaatagtattaaatttatttgatcgttttttaaaaatgagttattctttgattataaatactcaaggaggtagctgcatgaaaaaaaaggctccatttggatatgattttagaaacgggaaacttgctgtcaataatgaagaagctaatattgtaaagtattgctttgaggcagaacagaattatatgg

SEQ ID NO: 36019 - DNA, 260 bp, Unknown
  Description of Unknown: RightRegion for integrase B10020 sequence
actttagaatttcttaaggactacaatatggtagtcgatacatctaagaaacttagtgtttagttacatataatcctattaaacaatgaaaggagagtccgaatggctctccttttctataaaaactctttgaactatgaaaacaaagagaaaaaaagtattactaatgttcttagtatatattcacgcaaataccttacactaactagcatttgacacaatttcgttcatttatatataaaacaaaaatatatcaatga

SEQ ID NO: 36020 - DNA, 260 bp, Unknown
  Description of Unknown: RightRegion for integrase B10021 sequence
atgaaagaaaaagcacgactagatgcattgaaacgaaaaacagttgcaggaggtagtgaataatggcaaaagtaacgattataccatcgaagataaatccaataactcagttacctcataactccttaaacaaaagaaaagttgcagcttatgcccgtgtgtccacattacaagatgaacaagtaagctcttatgatgcacaggtggattactacaagaagtatatttctgaaaggcaagattgggagtacgttgatatc

SEQ ID NO: 36021 - DNA, 260 bp, Unknown
  Description of Unknown: RightRegion for integrase B10022 sequence
ctcaccctccacatcttcccccgcctccccgacgaaacccccgaaaacgacgattttgtgtgaggtttaggggtagcatggggttttggatgaatcgctattatcatgctatccctattcgagcacaaaaaaaggacccgggggccgatcattacgatcagctccgggcgttttttattcctctgtgtcgtcaggcggttcctgtttgttgtactgcgccgtggagatgcccagcagcgcgcccagcagcgtgcagatga

SEQ ID NO: 36022 - DNA, 260 bp, Unknown
  Description of Unknown: RightRegion for integrase B10023 sequence
accatacggtggataccagaatgctgcgctttcgcaatagatttttctctgcgggtttcttgatttttagtatactatataggcgcataaaaagaaaaagctccgaattcacttccggggctctttctctgtgctcatgtgtagctttctactccgataccgtcagatccacgatcagatgcttctcacctgaccatccgatctctttcagcgcggccttctggacataaaccgctccgatctttgctgtagtgagatcg

SEQ ID NO: 36023 - DNA, 260 bp, Unknown
  Description of Unknown: RightRegion for integrase B10024 sequence
gaaaaggggactttccatcaaatttgtggaaaatcccctttagtgaccgcgaaggagtcatagaaatattttgtaaaaatttaaaaatcagaaacttacaacattttgcgtgtcattctcgtgacatttttttgcgtaattctgcaacattgtcttcaatattttgcaggtgagtcaataaatcttggtgggtaccgtcttttctttttgtgtcagggatagttgtgatggtatttttttcttcccttaaaagccagttt

SEQ ID NO: 36024 - DNA, 260 bp, Unknown
  Description of Unknown: RightRegion for integrase B10025 sequence
gacaatcttagaaccgctgtggaccatcagatcgaacgatgggttcaatggctcgcggcttaattgcaattaaatacgctgataatattaccaaattttatgacgaaccatttgcattctcggacatatcccccaaaagagtttttacctctatagatgacttttacagtccatccttgattattatatcctaatccagaccaattttcaaataccaggctatctgggtcttttgctgacgcttcaatggtttgttttac

SEQ ID NO: 36025 - DNA, 260 bp, Unknown
  Description of Unknown: RightRegion for integrase B10026 sequence
gacagcgaagttacctaccattgggataaggatggcaacatgcttagcgggcagatgctctaacgtgccagacgaggaagccgcctagttcgccctgcgctgtcttctctctgccaccttccgttgccgttgctgctcaaccctatccaaatccaaagccatcgcgtgtgggcaattctcatagcttgggaagatgcccctcgccgcgttctccgcgatcatatgccctcgtttgaaggcacggctggtcaactccttca

SEQ ID NO: 36026 - DNA, 260 bp, Unknown
  Description of Unknown: RightRegion for integrase B10027 sequence
gtgcgcagaaccgtatcacaagtgatagtaaagcggaaatgggagattgaaatttgttattagatactcattaaaggattgctacctattttttaaaattatggagatgttgtattaaagtttgaataggaattattaacaattgtttggattagtagcttaagataaaattgtagaaaagggaacgtattttcgttatgcttatttttataaaagttaagtataattgatgcccgaaaataaaaaggtatactaaaatg

SEQ ID NO: 36027 - DNA, 260 bp, Unknown; identical to SEQ ID NO: 35559
  Description of Unknown: RightRegion for integrase B10028 sequence

SEQ ID NO: 36028 - DNA, 260 bp, Unknown
  Description of Unknown: RightRegion for integrase B10029 sequence
acagcgcccccgcgcgaagttttcagatactcacaactttttgagagctggtgtactgcataaaaaaagtacctgaatcgacctcaggtacttgcacagatgttgatgtaagggcaaagacatctacatcaagtggcgactggtggactcgaaccaccgaagagcgttgcccatctgatttacagtcagacccctttgccgctcgggacaaatcgccgtaaagcgacacttttagggaaaggaaagtctcgctgaacctt

SEQ ID NO: 36029 - DNA, 260 bp, Unknown; identical to SEQ ID NO: 35583
  Description of Unknown: RightRegion for integrase B10030 sequence

SEQ ID NO: 36030 - DNA, 260 bp, Unknown
  Description of Unknown: RightRegion for integrase B10031 sequence
ttgaaaaaatatataacaaaagaattggaagatattgaacaatgggaggtaacaaatgattaactattcagagcagcagaggtatgatacttcggctgcaaaaattgacatagaatcaaataaacgaccagtcataaatgaagatgaagaacttattattttaaatgataactttcgtttagaagattttcaggtggtacgaagagaattttttgcacatcttactgaaccggcagtaacttttaataagagaaaattct

SEQ ID NO: 36031 - DNA, 260 bp, Unknown; identical to SEQ ID NO: 35667
  Description of Unknown: RightRegion for integrase B10032 sequence

SEQ ID NO: 36032 - DNA, 260 bp, Unknown; identical to SEQ ID NO: 35665
  Description of Unknown: RightRegion for integrase B10033 sequence

SEQ ID NO: 36033 - DNA, 260 bp, Unknown
  Description of Unknown: RightRegion for integrase B10034 sequence
tacaccgttgatctgggccgtgggaaaggctctgaccccttgctagatatacatttgctataaagggcatttcttttttgcccttcatagatatcctgtatgttctatcttaatagctcacacatgatatcaatgcgcttaaaccacattgaaccatgttttctcgctcttcctccttttagaatggttcaacagaaagtagtatattacacagaaaaagcattttcaacacaaaaagaagggccaggggaatcatcccc

SEQ ID NO: 36034 - DNA, 260 bp, Unknown
  Description of Unknown: RightRegion for integrase B10035 sequence
caagattatcgcgactttttcgactgtgtccgaatttatgaagacgaaaaattgcgagcataaaaaaagcccgcttttaaaaaacgggctacttgttaattcaatataagagttgaacaaagaatcaaagttcaaaaataaagtcatataaagcataagttcggtttaaccaaccatgcaagaatccgcgttgacttttaacttttgcgaactcgttatattttcggattcgcgctaaaaaatacgcgtcgaggtcgttc

SEQ ID NO: 36035 - DNA, 260 bp, Unknown
  Description of Unknown: RightRegion for integrase B10036 sequence
aatctacaaagcataactaaggagtatatatatgaacatagaaagtacagaaagaactattagagttattcctgcaactcaaatagcaataggtaaagtaacaagctccataacaagaaaagagcgagtttgtgcgtatgctagagtaagtacagataacgaagatcaacttaatagttataatgttcaatgcgaatattatgaaaacaaactaaaaaatgatccaagtatagtctatgtcggtttatatgcagatgaag

SEQ ID NO: 36036 - DNA, 260 bp, Unknown
  Description of Unknown: RightRegion for integrase B10037 sequence
cataaagataaatcagtgacctttaggtttatatgtggtaaggaaattaagattgaatactaaaaaatgagtcgagcagaatggcgaatttgctattctgtttttcttttgctttaagtcgtattcaaaaaaggtacgcaatcgtacgaaatcgaacgtaaaaatacgtacgtacttatttgtattaaagttgttttacttagacattttttgaaatctataagtcttctagtaaggcttattttttttgcattttatag

SEQ ID NO: 36037 - DNA, 260 bp, Unknown
  Description of Unknown: RightRegion for integrase B10038 sequence
cgaagaaaaacaggaggtggcagtgatggcaagaaaggtcacgactattccagcaacgattaacaaatttacggcggcacctattgccagcaatgtaaaacggaaggtggcaggttatgcccgtgtcagtaccgataacgatgaccagatatccagctatgctgcacaggtagattattacacaaaatatattaaagaacggaatgattgggagtttgtcgggatgtacacggatgagggtgtgaccggaacatccacaa

SEQ ID NO: 36038 - DNA, 260 bp, Unknown
  Description of Unknown: RightRegion for integrase B10039 sequence
ggtgtccgcaacgaaacacgaatcctgtgtgaaaatctttacaagtgggcaattgtggcataaacgaccctgtaaaatcctctcagcttgttgcgctgtagcgcagaattgagctacgcgaaatataggggtagggtaagcaaaacttaaataaaacgccatacggacgctctgaggggctatttaagttttttgattccataaattattccaccggctactacgccccctatgataacaccataggtgaagcggttgtt

SEQ ID NO: 36039 - DNA, 260 bp, Unknown; identical to SEQ ID NO: 35670
  Description of Unknown: RightRegion for integrase B10040 sequence

SEQ ID NO: 36040 - DNA, 260 bp, Unknown
  Description of Unknown: RightRegion for integrase B10041 sequence
acggtccatcgtcgaatcgacaaggtactcgccatcgccacgcgtcggcacgctttgccctagcactaagctcgtacgggttatttcaggtcgattgcttccatgcaaaccaaccgctcaaaagggcgaacggtgtaatataccctaagctgcgggcggcgaggaacccggaagctttcgtacacccagtgctctaggaacggagcgtcgtcattcctgaatttatagccgacaagttgcggctctaactggaggcgttc

SEQ ID NO: 36041 - DNA, 260 bp, Unknown
  Description of Unknown: RightRegion for integrase B10042 sequence
ccccagagggatggagattacacacgcaatcatatgctcaggatggtgatccatttgagctgaaaatgaggctattcaccttccggttccggtgtcggctccggttctggcgtgtcatggaagaaacatttctgctctacctgaaagccgtcgaagttgagcagggtcgcaccgtggaccggactgttggaagtcgcggcacgcgtcaggatctcatagtattttgcgtaggcgctgtcttcctgctctttggctgacgg

SEQ ID NO: 36042 - DNA, 260 bp, Unknown
  Description of Unknown: RightRegion for integrase B10043 sequence
aaagcaagagaaaggagtaaattacaatatgccaaacgtaagaataataccgagcaaaattaatccacttacaaagctgcctaatgaatcgttgcaaaaaagaagggttgcagcctatgctcgtgtttcaaccgaacaagaggaacaagcaaattcatatgaggcacaagtggattattatacaaactatattaataatcatcctgaatggcagatggttgatatttatactgacaagggtatatcaggtactaatttaa

SEQ ID NO: 36043 - DNA, 260 bp, Unknown
  Description of Unknown: RightRegion for integrase B10044 sequence
attaaagaaaacgccgaaacatttaatattgttgaaattaacacgcttttaaaagttgcataattgttttttgatttacaaaaaacaaaaataaaattttattgaaattttttgcatttgaatttatttgaaaatcacttgaaaaattttttaataaaaaatcccataataacaatattttggaattgatttttggcattaaaattgttgaattttttatttgaatttttacgcttatttttacaataatgaaacccgca

SEQ ID NO: 36044 - DNA, 260 bp, Unknown
  Description of Unknown: RightRegion for integrase B10045 sequence
gcgcgggagctggttctccactttgtagagaaggcggtcgccgtgctgatagaattgcgctgagaacgaaaaaagacgcccggagggataattccccgccgagcgtcttttagtttgtctgtggcgatatttcccgccctgctgccgggagggcggcaggggagatggtttacttcttgaccgacgccatggctgcgatcgtcttcgggcccacaaggccgtccgcttccttcgcgccgaacatgtcggtctggaacttc

SEQ ID NO: 36045 - DNA, 260 bp, Unknown
  Description of Unknown: RightRegion for integrase B10046 sequence
caatgggaggagagaaatcatggaggtagcaaggacggtaacggtaatacctgccaagaataatagctatgaatgtttcaaagaaaataggcctattaagaaaaaagtagctgcttatgcaagagtctcaaccaattttgatgaacaagtttctagctttgaagcacaaagagattactatacaaaccatattaaatcaaaaccagaatggcagtttgtgggagtatataccgatgaagggatatcagctactagcacaa

SEQ ID NO: 36046 - DNA, 260 bp, Unknown
  Description of Unknown: RightRegion for integrase B10047 sequence
cagacgaacttttcaatagttatgattggatttatgtttgttttgagttataaacatatataaaaaagagcagggtctccccctgctctcttttattttaaatattccgaggccgcataaacgaccttgccttcatagataaccttaacccagtggtatccgtccaccagcacaggcggctcaccgccccacatatacacaactgttttcgccggcagcgtgtcacagacgctgcctttaagcccgggcgatgtccggac

SEQ ID NO: 36047 - DNA, 260 bp, Unknown
  Description of Unknown: RightRegion for integrase B10048 sequence
ttcgaaccttcgaccgcctgcttagaaggcataattaaaaaatattttaaagtactgaaatagaacgttttgcaatttataacattattaatattcgtgaaatattcgtgaaattaatataattttatagaaaaaataaaaaaaagcggtttgcagtaatgaatactaaactgatgccccatcaatttgcaaaccgccgtaagatcccaaatcttagggtaaaggtagttaatttaaaaaagcatacgtatttctaatac

SEQ ID NO: 36048 - DNA, 260 bp, Unknown
  Description of Unknown: RightRegion for integrase B10049 sequence
cgtttgtcgccttctgtcggaatgaggcgactcgaacgcccgacccctacgtcccgaacgtagtgcgctaccaactgcgctacattccgtttctgttttgcgagtgcaaaggtaaggcatttttttgaaatcaaaaagaatttcacagaaaatttgtagaaaatttgtagaatcaaaaaatatgtctacctttgcaaccacaaacgagaagctaaggttttttattgaatgtgctgagaagtaagttcctatgtgcttaa

SEQ ID NO: 36049 - DNA, 260 bp, Unknown; identical to SEQ ID NO: 36007
  Description of Unknown: RightRegion for integrase B10050 sequence

SEQ ID NO: 36050 - DNA, 260 bp, Unknown
  Description of Unknown: RightRegion for integrase B10051 sequence
cacggcaagtacgcggcgcgcaggttcgacccgcgccgggtcgagatcatgaaggctggctagactgccggcgcgacagagaagcgcagaggccggccgcccccggacgcaacgggggcggcccgctgtcgtttagggcacatgcgaaaggcccccgatgccccgggggccttcgtcgcgcgcgttccgtctgctccctggaaggggaaagcaagggctaccgtacccgatccttcacacaccagcacactccgatgggg

SEQ ID NO: 36051 - DNA, 260 bp, Unknown
  Description of Unknown: RightRegion for integrase B10052 sequence
gaaatgaaggaaaccgcacggcaacgaacactgcaacgctacgcaccaaaggaggtggaataatggcaagagaagtaagagtaatccctgccagtgtacacaaatttacgaccgttcctttcggctctacggtaaggaaaaaggtcgcaggctacgctcgtgtgtcaaccgaccttgaagaacagctcacaagctacgaggcgcaggtggattactacaccaagtacattcagaataatcctgattgggactttgttgag

SEQ ID NO: 36052 - DNA, 61 bp, Unknown
  Description of Unknown: RightRegion for integrase B10053 sequence
atgtcaactgaagaaatgggtaagggtttgtataagcgcacatttgccccgctgaaaaggg

SEQ ID NO: 36053 - DNA, 260 bp, Unknown
  Description of Unknown: RightRegion for integrase B10054 sequence
aaacaaaccccggtgttcttcatcaacggatggtttgtggccagcttcccctttgccggataggcaaagaaaggggccagtctaaattgactggccctgttttcgtgctccaaattaccaaatgcggaataatcttacggaatacggaataatcttccagtggacgcgcatggccttccgttttctggtatcatccgcaggaaggagcaaggtcgcatgatcagaattttactctccgtccgcctcggcgaaaggcgatg

SEQ ID NO: 36054 - DNA, 260 bp, Unknown
  Description of Unknown: RightRegion for integrase B10055 sequence
accgaccatttaaacctgaccctgtacccccgcgtcactccggaggaaacatcggatatttaattatcgtttcagcggtagcatagtatctactatgaattcttcataccatgctcccataaaaaactcgccccgcgccatcacggcgcggggcttcttctctcattccctgtcgggcggttcgtcttccttttccctcatggtctccagggcgcgcctgatcttctccgggaagggcacgccaaggagggcggcatttt

SEQ ID NO: 36055 - DNA, 260 bp, Unknown
  Description of Unknown: RightRegion for integrase B10056 sequence
gaagaaaaaagaaaggaattcggagaacaattaaaggagaagagaagacaatgccgcaagtaaccatcatacccgcaacacggaaatatcaaaacggacaagcccaggcggcggttcggaaaaagagggtagctgcctatgctcgtgtttcgacagggagcgaggaacaggaaacctcatacgaagcccagataaattactacacgaactatatccaaagtcgctcggactgggagtttgtgaagatgtactcggacaaa

SEQ ID NO: 36056 - DNA, 260 bp, Unknown
  Description of Unknown: RightRegion for integrase B10057 sequence
cttatgattcatacctttacagtcaccgtacaccctcagaaacgtggaaagaaaaccgtgtgattacagaagtctgttgacctctctctgcacagcagtataatcatatcctgcggcagtcaacttgttcttacggtctgtaccgttaccccacttacctgcgataacttccttcgcaatctgagtcacagatttcttactggaagtgctgccctttgccagttcattgactttcgcctgaacctgagagtaattgtacc

SEQ ID NO: 36057 - DNA, 260 bp, Unknown
  Description of Unknown: RightRegion for integrase B10058 sequence
gatgaagctaaagagcttgctcgtcaaaagtcgattgaaaggatgaatagccaatgctattagaaaaggaaataacatttataccagcaacagtcggtagatttgcacccgttgttataggcatacctgataaaaagcgtgtagccgcctacgctcgtgtttcgaccgataatgaagagcagcaaagtagctatgaagcacaagttgattattacacaaggcagattgaagaaaaccctgcttggaaaatggttgaggtg

SEQ ID NO: 36058 - DNA, 260 bp, Unknown
  Description of Unknown: RightRegion for integrase B10059 sequence
agttggacagatgaaatgaaggaacaagcacggcaacatactttgaagaggaggaaatactaatggcaaaagcggtaacagtaatacctgccacaatacacccattaacaaaactgccatctttaacgatgatgcttcgcagaacctgcggttatgcaagagtatcaacagataaagacgagcaattcacatcttatgctgcacaggtagattattatacgaattatattaaatcaaagcctgaatgggaatttgtgaag

SEQ ID NO: 36059 - DNA, 260 bp, Unknown
  Description of Unknown: RightRegion for integrase B10060 sequence
atcgcgcgggccgtcataaagtccgccacctgggacggcgagactctaaaaattttgctttgattttcgcttttttatcatgcgacgctcgcgcctcagaataaaaacgagaaaagcccccggctgcacgaagcgaaccggggactcttctctatatggtggaattttggaggagcttgttatctgagcatgtggtcgacaagcctctgcactgctgtgtagtcgtagcctgcctgctccagtgccttctttcttgcggc

SEQ ID NO: 36060 - DNA, 260 bp, Unknown
  Description of Unknown: RightRegion for integrase B10061 sequence
aacgccccttcactttacgttctcgaaccatatccagtgatcgtcttcaagattgcaatttgagtgcaaaatcactgcaaaatcacgacaaagacatggaagtctgtacaaagtacaaaaaaagcgccccgggagaattcccagggcgttacttatagtcaacagttattcttcttcatcgggcggtacttcttcttccggaatctctacaattccggcattcgctgcatcgatcaggccttcaccgatgatataggcga

SEQ ID NO: 36061 - DNA, 260 bp, Unknown
  Description of Unknown: RightRegion for integrase B10062 sequence
tcagcgcccccagagggggtttctgtttactcgcaacttctcgaaagctggtatcaagtatgatagctcatcccccgtagcgttccagcagttccagcgtctcgggatcgtccagaatgtcgctgagacggcagtccagggcgaggcagagcttcagcagggtggacaactccgccttgttgatgttgcgctggccctgttccagagacgttatcattcatcattatctaaaatctgggtcgtgccatcatgcaccgcca

SEQ ID NO: 36062 - DNA, 260 bp, Unknown
  Description of Unknown: RightRegion for integrase B10063 sequence
agccgtctcgccccggtagtctggatcagccggggcactctgccacgccgccgcgcggcctaacccaaccaccacgccagccaggccagccacagccaatgcgccagcagcagggcgccgaatagggccaggggggcaagaatcaagaagcgcatcgcgcccgttccgccagggcggcatccacttcggcccacgccatctgcggaatgatggccccctcgcgccagcggatgcccacgaaagacttgcggatgcagcgg

SEQ ID NO: 36063 - DNA, 260 bp, Unknown
  Description of Unknown: RightRegion for integrase B10064 sequence
ctgtatgcggatcacgttgagataacagttcccattcaaaagagagggactgtgcctgaataagggtacagtctctctcttttcgtcttttcttcccaaagcaagagctcctccgacggtttacgccatgcaggaataatcctacggcaaaccggaataaaattacggtgcccatgcggattgatacggcatggagtatcatcacagcgaaggagctgctgcaaaatgattcgaattcgactgtccactctcctgggcga

SEQ ID NO: 36064 - DNA, 260 bp, Unknown
  Description of Unknown: RightRegion for integrase B10065 sequence
gccgaaccctcgatattagatttaacagacctttatagcatttttggtgagttggtggcgtaaaaaaagcgtaagtagcgaccttacgctttaacgacaatgaaatcaaaaaacatttgtcctaaatgtggctcacaaaaataatgtattcttacatttaaaatgttttctgcagttttaagcataccaacactacagaaacgtcggataattacggacaagaagccgctgcagcgcttaatagtcatactactacttcc

SEQ ID NO: 36065 - DNA, 260 bp, Unknown
  Description of Unknown: RightRegion for integrase B10066 sequence
ggtctagaaaaagatttctccactatctcgaatgaatataatatgcaattcattgatttttagaagtaagactagagacagtattctaaaagtcaacgaaagggtatcttaattgataccctttaatattaattaatatttatatttgtacgtatccctaaatataatttatctgttgttttatatccacctacaataaaatctttaaaatctattttctttttatcttcgtttaaattatctataaatttttttaattt

SEQ ID NO: 36066 - DNA, 260 bp, Unknown
  Description of Unknown: RightRegion for integrase B10067 sequence
ggcgataaaaaaggtggatacttatgcacacggtttgcggtgcgaataattatctacaaataagcaataaaaaaaaaacgccaccctgcacgcacataatgcagagtggcgtttcctagttgtgtccaagatgtgttaaaggaggtttacaagcgattcagcatatcgtcgataacccggtcagcggcagcctccagcagggcaattcctccaatcatgtttacccgcagaaaatattccacaaatccggtaaaaaatat

SEQ ID NO: 36067 - DNA, 260 bp, Unknown
  Description of Unknown: RightRegion for integrase B10068 sequence
gaaatgaaggaaattgcacgtcaaagagctttagaacaacatcgcagaaaggaaggtaaataatatggcaaaggttacagttataccgtcaaaagttaatcctataacgctaacaccgataggacaagtagtaaagagaaaggttgctgcttatgctcgtgtttccaccgatagcgatgaacagtattctagttacgaagctcaagttacctattacaccaatttcataaaaggtaagccgaattgggagtttgtaaagg

SEQ ID NO: 36068 - DNA, 260 bp, Unknown
  Description of Unknown: RightRegion for integrase B10069 sequence
gaaaagatcgattatagcagggaaaatgaaaaagaattcatactcgacataactcttaagtagtcgggtttctatttcgatcttggtgagtatcatgttggtgattcacttatacaaccgcaatgatacacatgaaatacaaaggagtgataaggcatgagaatcgtatggcaggacactaacccaaaagtcaagaagcctaagaataaaaccgcataacgaaaaaagaagagggtgtgtttaaccagcgaccctctttc

SEQ ID NO: 36069 - DNA, 260 bp, Unknown
  Description of Unknown: RightRegion for integrase B10070 sequence
tcctggacacctgaaatgaagaaaaaggcttcagaagctgaagcaaggaggagacaaaagtgagcatgcccgctcgtgttacggtactaccggcgaccaaaaaccggtataccaccatgcccattaagtccacccggaaacgccgcgtggctgcttacgctcgcgtatcgaccgacagcgaagagcagatgaccagttatactgcccaggtgagctactataccgattacattcagcgcaatgtggaatgggagtttgta

SEQ ID NO: 36070 - DNA, 260 bp, Unknown
  Description of Unknown: RightRegion for integrase B10071 sequence
gaaaaactgcgtttacgcagcgtttcattcgggatcgccattcaaagacgagagggcagataacgccctctcgtttttttatgtctgcgctggggcacgtcgtcgagaggtgcgcgcagtcctgttcaaataaaagtcagccggtgttttcaaccgctttcgtctcgatgtagacgtcgccgctatcaccgttcatttcgttcacctctgcttcgatcagaagtttagcttccgtttcgccacaaataatattccgctcg

SEQ ID NO: 36071 - DNA, 260 bp, Unknown; identical to SEQ ID NO: 36068
  Description of Unknown: RightRegion for integrase B10072 sequence

SEQ ID NO: 36072 - DNA, 260 bp, Unknown
  Description of Unknown: RightRegion for integrase B10073 sequence
atgaaagaacaagcacgattaagagcactagaacagcatcatggaggtggagaaaatgcctaaagtcacagtcataccatcaacaattaatcctattacacaaatgcctatccatgcgaatcatgttaagaaagtagccgcatacgctagggtttcaacaaacagcgatgaacagtacacgagttacgaggctcaggtgaatttctataaaaaatacattcaagaaaaacctgactgggagtataccgaagtttacgctg

SEQ ID NO: 36073 - DNA, 260 bp, Unknown
  Description of Unknown: RightRegion for integrase B10074 sequence
aaacccggcgataacctctccatcgtcgtttacccccgcctcccctccaatcccgatttataattcgccattttagagatagcatagtgtatgcgacgaatctcaaatataatgctatcctccatcatgtaccaaaaaacaggccctgccgtttttgcggcagggctttattttagcgttacgttaaatcgaacaataaggcttgacaatagcgttacgctgtgctataatagtatcaacaaaagcaagggaggtgatag

SEQ ID NO: 36074 - DNA, 260 bp, Unknown
  Description of Unknown: RightRegion for integrase B10075 sequence
tggacggatgagatgcgagaagcagcaagaaatcgaataaaggagagagtggtcaatggctaaaacagtaacagttatacccgcaacaataaacccattaacaaaaattcccgtgatcggcttgcacaaacgccgtaccgccggatacgcacgtgtatcaaccgacaaggacgaacagttcacttcttacgaagcccaggttgactactacacccaatacatcaaaaagaaccctgaatgggagttcgtaaaggtttaca

SEQ ID NO: 36075 - DNA, 260 bp, Unknown
  Description of Unknown: RightRegion for integrase B10076 sequence
aggatcgaattcagcagggaaaatgatgaagaatttatattggatgtgttcctgaagccttaactttgggaacacaagacctatttcctgacttcaggaatatggtctgaaatctgtatgcatcatgaatgtgcttcttttaaatcaccatcatgatacatacaaacctattgacgcaaatcgacttccaatattatacaaccaaacaccaaagaaaggaagatgcaaaaatgcgtgttgtatggaaagacagcaagccc

SEQ ID NO: 36076 - DNA, 260 bp, Unknown
  Description of Unknown: RightRegion for integrase B10077 sequence
gcaatgataaccgtcttgtcgtatggattcgtactggcaacccgattagagagcaggctttaagaggcctgttctctttctttttaggtagttgagtagtccgcgcaacaaagtttcttacgcgggtatatcgtacatagggggtcaatgtaaattcgctcttcttcctccttactttttcaaaaaatctttttaagttttacggactacttcaactaccaaagggataaaagccttaccgtgcctaactttttcaaggt

SEQ ID NO: 36077 - DNA, 260 bp, Unknown
  Description of Unknown: RightRegion for integrase B10078 sequence
ggtggtgcaccatttgtcacacatccgaactctcggatcgtgatctataccatagcggtataaaaagaaggccctgggcgcgatgcccagggctttcttttgccttacaggttgtacttgtccgtggggttgttgacaatgccaaaacccaccagcacgggcagcagcacgtccagcaggccgttcacggtttcgccgatgtccagcccggcgaactgcttagcgcagaacaccaccagcgcggcgatgctcgtccacag

SEQ ID NO: 36078 - DNA, 260 bp, Unknown
  Description of Unknown: RightRegion for integrase B10079 sequence
gaatacggaaaccgctggggcgaggctgcacctatggagctggacgttcatttgacggtctgatatttttttaatctttatatacatcatgaatgcgcagaagaatccgcacattgaggatgtacattagaaacataacaaagagactccccatttcggggagtctctcttgcgttagttgccgaagtagtacaggtagtctgcgtcatccttcacggaggaatacacggtaccgtagaggtacaggtagtcctttgcag

SEQ ID NO: 36079 - DNA, 260 bp, Unknown
  Description of Unknown: RightRegion for integrase B10080 sequence
gtaagtggggcgaacacccaaaggataactattctacagcgtggagccctttatgaagactgatagttgtcaagtttttgaggatcatttgagtgtcagaaagtacctattctcggagataagtgtaggtaaatttaaccattatccaaaattatcatgagaatattgaacttgaggtcatataactcaccttatggtataattgcattgcatgttaatgaaccacctttctgaatgagcccagtgctgcagcaccgggc

SEQ ID NO: 36080 - DNA, 260 bp, Unknown
  Description of Unknown: RightRegion for integrase B10081 sequence
ggcgaacccatcacggttcgagtctggcgacacgtcattatcatcactatcgatttaatctaaaaataagctccggcttttgccggggcttattttttccacgaaattcgtggttttctgttgacaatccacggaatccgtggtatcatataatcaagttaagggacaggaacaccaacagcaaacaaaggaggacaaagatgatcacaagaacttttgcagagaactacagagacagctacgaagcaggtatgacagtt

SEQ ID NO: 36081 - DNA, 260 bp, Unknown
  Description of Unknown: RightRegion for integrase B10082 sequence
aaggtacaaacggacggcaaattcacggttgttttcaagaacggtttggaaatagtagtgtaaaaaggagccaaggcataaagccctgactccccgtcaaaattaaattgacttaggaacggtggcgatattactcgtcatcgttttctcttgttccgcccttggtggtgataacaccttccgtggcatccttgaggttgaatacgatagcaccttcctccacgaaacgctgtccgggaatggaatagtacttggtgtca

SEQ ID NO: 36082 - DNA, 260 bp, Unknown
  Description of Unknown: RightRegion for integrase B10083 sequence
cccaccgaccacctgtccctcaccctctacccccgcgtcccctcagacgtggacgatgtttaatgctgcctttagtggtagcatagtgtgaagcacgaatctttcatgtcatgctactataaaaaccgccccgggatcattcccggggcggttgacttttcgagcatctttgtccccgctgcatcgacttttagcttcttcatcctcggcctcgtccatgccgctcttgttccgtcggcagcagtctaaaatccgcccgt

SEQ ID NO: 36083 - DNA, 260 bp, Unknown
  Description of Unknown: RightRegion for integrase B10084 sequence
tcggaaagctggacggcggaaatgcgagagaaagcgaggcagaaaaaatggcgacagtcctaaaaataccggcaaagtttcatcccataacgcatttaccggaaaccaaggtgcagaaacgcagagtggcagcctatgccagagtttccacggattctgaggagcagcagacctcttatgctgcacaggtagatcgctacaccaagtacattcaggaacgggcagactgggagtttgttgcagtctataccgatgagggc

SEQ ID NO: 36084 - DNA, 260 bp, Unknown
  Description of Unknown: RightRegion for integrase B10085 sequence
ggcgaacccatcacggttcgagtctggcgacacgtcattatcatcaccattgatttgttctgacgaatcaaacattaaacccggaaggtgccgtctggctgcctcccgggtttttatgtgcatagttgtccggatccggatcagctctatgctcttataggtctttgtctgccgaaatgcagcatcccgtcattccagtcacttcgcagaaggttttgatccggagcctcagggtgttgtcgtctttgtcgacatattcc

SEQ ID NO: 36085 - DNA, 260 bp, Unknown
  Description of Unknown: RightRegion for integrase B10086 sequence
atcgcgaagtccgtcatccgtgaggccacctgggacaacgagaccctttttattatgctctgatgttctcgtttttatcctgcgcccttcgcgtctcaggataaaaacgagaaaaagaccgactcctcaaagttgaggagtcggtcttcttttagtctctgccctgcatatagagtcctgcagagtatattgcatatattcccatcatcgcgagggtgatcccggtgccgaggatcacgaacatgatcaaggctatgatc

SEQ ID NO: 36086 - DNA, 260 bp, Unknown
  Description of Unknown: RightRegion for integrase B10087 sequence
caaagagagataacgaggaggtcaacaaatgccaaagataacagtaataccacagaagattaatccattaacacatattgataatctatccttaacaaaaagaaaggttgctggctatgctagagtttcaacagatagcgatgagcagtttacaagttttaaagcccagacagattattatgaaaaattcatcaaagctaatcctgaatgggagtttgtaaatgtttatactgatgaaggtatatcaggaactaatacaa

SEQ ID NO: 36087 - DNA, 203 bp, Unknown
  Description of Unknown: RightRegion for integrase B10088 sequence
ataatgaaaaatgtactgtcaggttgtacatggaatggagagactctttttgttaccttttagctcacttttgtattatgatacgttcaggccgcatccgcaaagctgagcgtatcaaatcgcgaatagatatttcagtacatccctctaaagttgcatttctggactcaagccggacaagattatcaattccctgtatctgc

SEQ ID NO: 36088 - DNA, 260 bp, Unknown
  Description of Unknown: RightRegion for integrase B10089 sequence
atcgcgaagtccgtcatccgtgaggccacctgggacaatgagacgctttttattatgctctgatgttctcgtttttatcctgcgcccttcgcgcctcaggataaaaacgagaaaaagaccgacccatcaaagttgatgagtcggtcttcttttagtctctgccctgcacgcagagccgaggattatctgacgtataaaatgccgttatggtatgcggcgatccatccggaagggcaccggatccagatgttcgctccgat

SEQ ID NO: 36089 - DNA, 260 bp, Unknown
  Description of Unknown: RightRegion for integrase B10090 sequence
tggcacgatgaaagctttgaaatttggattttacctaaaattaaatctaattttattttgtgaactaaacatcaatggttgactttatcaagccaatatgaatctgatgtgttattatctgaaataagagttaaaacttttctaacagtgtgtgcaagttctaaaggtcttatattcggtttatcaagtggattataactgaaattactatttaaagatatttgaattacattaacttgttttgaatatttttcagctac

SEQ ID NO: 36090 - DNA, 260 bp, Unknown
  Description of Unknown: RightRegion for integrase B10091 sequence
ggcgaacccatcacggttcgagtctggcgacacgtcattatcatcactatcgatttaatctaaaaataagctccggcttttgccggggcttattttttccacgaaattcgtggttttctgttgacattccacggaatccgtggtatcatataatcaagttaagggacaggaacaccaacagcaaacaaaggaggacaaagatgatcacaagaacttttgcagagaactacagagacagctacgaagcaggtatgacagtt

SEQ ID NO: 36091 - DNA, 260 bp, Unknown
  Description of Unknown: RightRegion for integrase B10092 sequence
tggacacatgagatgaaaaacaaggcgaaagatgaagcccaaaggaggcttggcaatggctaacattcgggttatcccggctctggcgcctattgtgtccgctcaggtgaaggatacggcgttcaagcggcgggtggcggcttacgcgcgagtttcaaccgacagcgacgagcagcagaccagctatgaagcacaggtggactactacaccaagttgattcattcccgaccagactggtctatggtcgatgtatttacgg

SEQ ID NO: 36092 - DNA, 260 bp, Unknown
  Description of Unknown: RightRegion for integrase B10093 sequence
attgtgccactgggcatcatggccgatgtaatcatttcgggcacttgcccgttggtctactgagccgcggcccggctgaacgcctgttgccccccgcccctgaacgcgcgctaccctcgccgacgtgcccgagcccaactggtcccgcctgacgccggccgaacaggcgcaggtgcgcgccgagatcgaacgcatcgagcgctactacggccggctccggttctggtgctcggccgcgatgatggcgctggtagccggcg

SEQ ID NO: 36093 - DNA, 260 bp, Unknown
  Description of Unknown: RightRegion for integrase B10094 sequence
gtgacgatagtcgtcttgccttatggtttcgtacttgcgacccagattaaggataggctttgagcctgtcctttttcttttggtagtcggtagtccgttttaacgaattttccttatatatacacgtaatgcgagggagcgacgagattgcgctttgagtccctttactttttggaaaaatcttcttagtttttacgaactaccagtactaccagatagccaaaggccttgtaaatcaaggactttcttcggtagcaggc

SEQ ID NO: 36094 - DNA, 260 bp, Unknown
  Description of Unknown: RightRegion for integrase B10095 sequence
ggtcagggccaactttacgcattggaaacacacccggtcattgcatttaagatagcgatataacgcaaaaaagcgccctgggatcatctcccagggcctccttttacccattttcttcctgatcatccgcgggaggtttcttttcaacctccggcagaccggtcaggcttgtcagaatactcaggactaaggccactccactcacagagagtgcacggagccaatcgatctccgaaaaagctgcaccgacagcaatcatc

SEQ ID NO: 36095 - DNA, 260 bp, Unknown
  Description of Unknown: RightRegion for integrase B10096 sequence
tcccaggcagcagagtgcggcaagaaaggtgcggctgcaaaagaaaggagaaggaagaagtgagtaaacaagtaacaattattccggcaaaacttaatcgtgcaacatttacacctttaaatcagcctgtaagacgcaaggttgccggatacgcaagagtctcgacagattccaaagagcagaagacttcctacgatgcacaggtatcctactacactgaatacattaaaaagcgtgatgactgggaatttgtgggcgta

SEQ ID NO: 36096 - DNA, 260 bp, Unknown
  Description of Unknown: RightRegion for integrase B10097 sequence
ccattaggacaaccacattattcgttatccctagacacgacaaggaaggacttgaaggcttaaaaaggcggagcattgcgctccgctgctttactgctcaaagacattattgcgtatgttgttgaaggctatcgctctgcgcttctcaagctctgcctggcattctggcttttcgactttgaggtcgagcaagtcagcatagtagcggtagaggcttgagcgccatttgccatcttgtagctcgacattgttgctgcaac

SEQ ID NO: 36097 - DNA, 260 bp, Unknown
  Description of Unknown: RightRegion for integrase B10098 sequence
gttaacgacatctgtacacaaggatgtaataaaatagaacggttcatatgggccataaaatgaatttatggcctttttatttaccgttattgacatttattttatagcccattcgctatataatacaaaagggcttttacttcatagcccaaattgcccttgcaccttgacaacttcaaaaatattgctcacgtagcaccttcacaaatcaacaaaggaggacttttatgatcgtaaccttaaaaacctttacacctgat

SEQ ID NO: 36098 - DNA, 260 bp, Unknown
  Description of Unknown: RightRegion for integrase B10099 sequence
attcatcttcgtgacgctaggagcataaagattgctctagataagcaaggaagacttacatgaataccctagcgcgcagcgttaccgctatacccgctaccaaaaaaccaggccacaacgttactgcctgtaacccattgttcaaacggaaagtcgcagcttacgctcgagtctctacagacctggaagaacaagccaccagctaccagacccaaatcaactattacaccacccatattcaatcccgctccgattgggaa

SEQ ID NO: 36099 - DNA, 236 bp, Unknown
  Description of Unknown: RightRegion for integrase B10100 sequence
acgccccgccaaaaatcgacaagtttcgacagaagcttgtcgattttactttttcactcttaactcttcactattcacttttttagtccttacacaaaaaaatcctgaatgcgttggcttaatagtgacaagtaactatttgccgcagagaacggtgtgacccgaaggtcacgccgtttttctgcgtccataagttgtttctgtagtaattgtttcggaaataacgggaatttcca

SEQ ID NO: 36100 - DNA, 260 bp, Unknown
  Description of Unknown: RightRegion for integrase B10101 sequence
gtagagcttatcattctaccttacggattcgtactggcttcacatctaacaagcccgctttaaccggtgggctttttgctttgcagcagagcagcagatttttcttatataatttataaaagtacgttttgagaatttttatatacccttttctctctaatcatacatttttcatttttataagaaaaaactgctgattctgctgatttagcctccaaagccttgaaaacaaaggatttttcgagcagcaggtatctgct

SEQ ID NO: 36101 - DNA, 260 bp, Unknown
  Description of Unknown: RightRegion for integrase B10102 sequence
accgtattccatgatggcagaatggttttccagtttgttgatgggacggagattgaagcataaagcaggaaacccactatggcattaagctgtagtgggtgctttttttgcttttcacaagaaaacgataggtgggtgcatactggaaaacgataactgaaaaagggtgcatttttactttgggagggtgcattttttgcccacaagaaaacgattacttttctcaaaacaccccaaagtgcgaaatcaaagcgtatttt

SEQ ID NO: 36102 - DNA, 260 bp, Unknown
  Description of Unknown: RightRegion for integrase B10103 sequence
ggaaaccgctggaagtccgaaggtttcgagctggatatcactctaaatgtacagccaatctaatttttccctatcacctacatcatagtggcgcgtgttcatctgctccccgatgatgtacgtgataaaaaaagaagggcgcgggcccctctcagctatttataatacgtgctgtgctatgtattcgctgatctctttaatgtcagtatcaccgaaaaactcaaactttacttttcccaaactactaaagtatagttcca

SEQ ID NO: 36103 - DNA, 260 bp, Unknown
  Description of Unknown: RightRegion for integrase B10104 sequence
tatgacaccattgacaatggcgtgaataagaaagtccctgtcctggaagtgtatatgaaataagggctgaaaattttttggcccttggttatagtcctgtatacgacattttaatgtcagtaacatgataagaaccatcaccagaccgcactattcgcccactataatcactacctagttttgcgaataccttattaaatgatacaccaacagaaatggtcagccctgtttcattacggacacggtttcggatttcatca

SEQ ID NO: 36104 - DNA, 260 bp, Unknown
  Description of Unknown: RightRegion for integrase B10105 sequence
accgtattccatgatggcagaatggttttccagtttgttgacggaacggagattgaagcataaagcaagaaacccactatggcattaagctgtagtgggtgcttttttttgcttttcacaagaaaacgataggtgggtgcatactggaaaacgataactgaaaaagggtgcatttttactttgggagggtgcattttttgcccacaagaaaacgattacttttctcaaaacgccccaaagtgtgaaatcaaagcgtattt

SEQ ID NO: 36105 - DNA, 260 bp, Unknown; identical to SEQ ID NO: 35619
  Description of Unknown: RightRegion for integrase B10106 sequence

SEQ ID NO: 36106 - DNA, 260 bp, Unknown
  Description of Unknown: RightRegion for integrase B10107 sequence
atcgcgcgggccgttatacgtgaggccgtgtgggacaacgagacgctttttattgtgctttgattttctcgtttttatcctgagcccatcgcgtcgcaggataaaaacgagaaaaagcccgacccatcaaaaatgatgagtcgggtctctttatctgtcccggaatatgtcgcagaaggctttccacacggcatagaagccgagcccccataggctgagaaggagggccagcactatgagaagcacaactgcgaccaccg

SEQ ID NO: 36107 - DNA, 260 bp, Unknown
  Description of Unknown: RightRegion for integrase B10108 sequence
ggttgtcctgcattatgggtcccccttcagggccttcataattgcaaaatacgcgcgatttaggaaaagacgaccagttggtcgttttttcgttttattgcttattttgcccggtgcgccgttgtcgtggcctgctcacaaaaaaagaggcagcgcgtctagaactcaggcccatcagacgggcccggctgtctctttctcccggccgattctccgcgggttcgtacatcctcagccagaggcgggtgatccgccttgtc

SEQ ID NO: 36108 - DNA, 260 bp, Unknown
  Description of Unknown: RightRegion for integrase B10109 sequence
cgtacaaccacagaaaaaagattaaaaacactggaggcgagaaaaaatgccaaagaatgttagaaagatacctgcgtcagtaaacttgtataatgcagcaccaatcactaataagaaaaaaagaaaagtcgctgcatatgccagggtttcaacagaccaggaagaacaattaacgagttatgaggcacaggttgattattatacaaattacattaaatcaagagatgattgggaatttgtcgacgtatatactgatgaag

SEQ ID NO: 36109 - DNA, 260 bp, Unknown
  Description of Unknown: RightRegion for integrase B10110 sequence
attgtaaacggagtacttttacactctctgagtataggcgagagaaatccatcctgcgcctgactttagttttccccacccattctgttcagagacaatcgtgtatatacccttgtctctgatacatcctacaatgggatggttcgttcctgctctgctacggatattcagtgcatcaacagtgacctttactttgtaaagcattgaagagtttgaaggcgtagaagaactagaagccgggtatacagcagttccatttc

SEQ ID NO: 36110 - DNA, 260 bp, Unknown
  Description of Unknown: RightRegion for integrase B10111 sequence
cggtcggcccagttccagccgcggcccgccttccggctggtcgtgccgatgggagcccgatgacagagctagcgctcgcctgcccctacacgtcctgtccggtgccgccgctgctgaccgtgccgaacctgaccctgcacctggtcgagcagcatcaccggccgcacggcgaggccttcctgaccgcgtccgggatcgaggagacggcgcgccgggctcgaggacctgccgccgacggggatggatcgacggaagcacgc

SEQ ID NO: 36111 - DNA, 260 bp, Unknown
  Description of Unknown: RightRegion for integrase B10112 sequence
tcagcgcccccgcgcgccgtttcggtatactcgcaacttatagagagcctgttcatattatagcgtttccgcccattttttcataaacttcgttattgacagcttttccttttcggctctggacgcgatcttgttgtgtgtagctctgtccacccgaatcataacgctgtccaagtctggcttcttcggataccgctcaggctcaccgagtagtgctttcgcctgcttgtcgtccacggattcgacatggtcaccaatga

SEQ ID NO: 36112 - DNA, 260 bp, Unknown
  Description of Unknown: RightRegion for integrase B10113 sequence
ctgccgactgcgcccccagaggcggaagcgttatactctcaattccacattcacgcgtggtgattattccccattcggttccggtgtcggttctggttcaggcggagtgtgcatgaaggctttgtattccaactggaatccgtcatagttcagcagtgtcgcgccgtggacgggactgttagacgtcgccgcgcggttcaggatttcatagtatttgccgtatgccgcgtcttccgattccttcgcggacggataggcgg

SEQ ID NO: 36113 - DNA, 260 bp, Unknown
  Description of Unknown: RightRegion for integrase B10114 sequence
ccggttcgtagcaagcacaagtggctccccgacctgggctcgaaccagggacctacggattaacagacccggtcgggactccgcgtcactcaacgatacaccggaaaacacacgcccggaagaggtcaaccgccggatcaggagaccgttgcacgaccagatcccgggcctgcagaccacgccgcagcgagatcggcgccggcactttggggctgtgtgcagacgtctgcacgcggcagggcatacaaccgcggcttggt

SEQ ID NO: 36114 - DNA, 260 bp, Unknown
  Description of Unknown: RightRegion for integrase B10115 sequence
atagtcggctcatatgccgagctgacattcaagttcaaaaacggagtagaaataacagtgtgaggtatatattatgattagaaaaattacatcagtgttatcactggctttatttatagtgataaaaataatgctttttttaggatatggaggataaaaactatgaatgatagatacacatttagaggctacagtccaaatatgtcagcagaatcaaaacacgaaacaggctggatatatggttacttagaaaacgtaca

SEQ ID NO: 36115 - DNA, 260 bp, Unknown
  Description of Unknown: RightRegion for integrase B10116 sequence
tccttcgtggacaccatgcgcattcgtgaagacggcagcatcgccgacattatttttttatgataatgatgcacctaattcagcgttgcccgaaggtgacgccgaattaggtacatcttttttcttattccgggatgaactccacgtcgcccggcctgccgctgacgaaatatccgtccgctgtctggtacaggacgccgtccggcgttgtgaacttcttcacagccttcttcacatcgaaggccgtcacgccgcagatc

SEQ ID NO: 36116 - DNA, 260 bp, Unknown
  Description of Unknown: RightRegion for integrase B10117 sequence
tctggtgtaccaaacgttttacatccgaacacgcgggtgacagccttccggctggccatctgatcggatgaagaaaagaccaccgaaatggtggccttttttttatcgaattcctcctatctctctgcattcttttaatgataaatcacaattcccgcattcttgtatacaggtttttgttttttctttctttatctgcttctccatgtcctcccggatcaagcgtttgatgtatccctggatgttttcctgcttctcta

SEQ ID NO: 36117 - DNA, 260 bp, Unknown
  Description of Unknown: RightRegion for integrase B10118 sequence
ctaaatgtggtagcgggggcgcgctttgttattaagaagcgccgccgctaccgagtggcatagccctgccacggcgcgagagtctacccacatgggccgcccctgtccaccagtgcgccgcatcgcttaataattgatagggaaaaccctgtatttttttcgagatatttaggtggatgctttaccctaaagtatttactaaaatcattgacactgcgcgcggcccgtgttttaatatccccacggtagctaatcagcta

SEQ ID NO: 36118 - DNA, 260 bp, Unknown
  Description of Unknown: RightRegion for integrase B10119 sequence
aaatccgaacctcgcctgatatgggtgcatcggatgatggggattgtcatcctccgcggataacaaaaaagccgggaatcgctcccggctttttcgctgtcttatacttcctccggctcgctcttgggcagctccagcaccgccgcctcgatcaggtcggagatggccgcgcagtcggcgtcgcccagctccaggccgtcgatcttggcgtagagctgggcctgggccatggcctctgttttccgggcctgattgtccca

SEQ ID NO: 36119 - DNA, 260 bp, Unknown
  Description of Unknown: RightRegion for integrase B10120 sequence
cacaggcgaaccatcatgtaccgcggctgcgcttatgtcattttgttcattccgcgccactgaacgaacgaacattgttttccgtaaagtacctgtgtacaggcgtagagacgtgggattagagatgcagtgatatcttaatttctttaagtatcacccgctattctctaattttacaaagttttatgatttttatgttcaaatgttcactaagtggagtttttggcttaaaaacgccaaaaacccagtgaacaatccag

SEQ ID NO: 36120 - DNA, 169 bp, Unknown
  Description of Unknown: RightRegion for integrase B10121 sequence
gtaattgtgaacagcaaaaaggacatgcggttcatctggaaagatggcactggggaagaatagccacaaagtgaataagaagaaaagggagcacctgcgaggatatttgccttgcaggtgtttttcttgtttttggcaaatatattaaaataatctgaaaatataaaaa

SEQ ID NO: 36121 - DNA, 260 bp, Unknown
  Description of Unknown: RightRegion for integrase B10122 sequence
cgggaaagctggacgattgagatgcgccaggcggcttgtgaaaaagcgaaagggaggcagtaaaatggcgtcaagcgtaagggttatcccggcaagcgttcgccaccactctgcccatggtgcgccactatccgccaagcgaagagctgcggcttacgctagagtttccaccgacagcgaagagcaaatgaccagttacgaggcgcaggtagactattacaccaagtacatcaaggaacgtgccgactgggagtttgtac

SEQ ID NO: 36122 - DNA, 260 bp, Unknown; identical to SEQ ID NO: 35982
  Description of Unknown: RightRegion for integrase B10123 sequence

SEQ ID NO: 36123 - DNA, 260 bp, Unknown; identical to SEQ ID NO: 35625
  Description of Unknown: RightRegion for integrase B10124 sequence

SEQ ID NO: 36124 - DNA, 260 bp, Unknown
  Description of Unknown: RightRegion for integrase B10125 sequence
attataaaaaaaattgttttcgaccgtcagatgaatgaatttcatttctactactatgcttagctgatcgtcacaaattatcaggctatttccagttgacataatactccattttttagtaaataacaatatatataaaaccccggaattccttgtaaacacaaggttttccgggcattcctataggtttatgcattttgggcccccggattgtaaaaacagataatgtattaaggtatctggctgcatactctgacagt

SEQ ID NO: 36125 - DNA, 60 bp, Unknown
  Description of Unknown: RightRegion for integrase B10126 sequence
cccaaatgggtatctgcttttttgcatatgcagaggaaggggctcgaatggttttatcca

SEQ ID NO: 36126 - DNA, 260 bp, Unknown; identical to SEQ ID NO: 35776
  Description of Unknown: RightRegion for integrase B10127 sequence

SEQ ID NO: 36127 - DNA, 260 bp, Unknown; identical to SEQ ID NO: 35625
  Description of Unknown: RightRegion for integrase B10128 sequence

SEQ ID NO: 36128 - DNA, 260 bp, Unknown
  Description of Unknown: RightRegion for integrase B10129 sequence
tctacacctatcgaaaaaacagaactccttttgtccctttttaataatatcaagactgcttaacccatgcccaacctccaaacccacttcgcctcattgcaccaggatgctatcacctggaaagctgggtatatttacaaccaggccaccaaccctgccgacaaagccgccgccattgatgccatcgccgccaccatcacctgcatacccggggtaacagcccaaaccacctatgccgctgaaatagaacatcagttaaa

SEQ ID NO: 36129 - DNA, 260 bp, Unknown
  Description of Unknown: RightRegion for integrase B10130 sequence
gggaaaggcaacgagattggtttccagctagacattttcccaaaaatccagaagaataattaatgatatcttctatgtgctgacgaattggctcattgatgttatcagtaattaaaaaaagaaattcccggggctaattccccgggatatttttactgcttcttaatatattttgcagatgcaaagccataatactttcctgcaatacggatataataccacttactaccgtttttatctttctgggtaaaattcattac

SEQ ID NO: 36130 - DNA, 260 bp, Unknown
  Description of Unknown: RightRegion for integrase B10131 sequence
caatacgtctttgtaaatggcgtgttcggctgcatcttccataggaagaaggacgaggattgacagcacagcgccgggtgaaatatcccggcgctgttcctgtattcagaggtgaaatcaggctcaccgtcaatttcattcccgcatcaggcatcagggcaaccgccgccctggtgcctatttttgcccccttctaattatccgcgcgcgcgtgcgcgaggggccttttctggcctgcccaggtgaatgaaattcataaa

SEQ ID NO: 36131 - DNA, 260 bp, Unknown
  Description of Unknown: RightRegion for integrase B10132 sequence
acggtgtttttcttgccgcaagttttcggaattgtcgcattgataaaaccgccgaggggttagccctcggcggttttgtttttttctttagggcaaaaagaaaaagccgggggctgtgcctccggctttttgaatacttatgtgttcggcttttcgatctcggctacaagggcggacggggagatgcgcagggcgtaggagaggcggaagacggtctccagcgtcgggcggcgggtgccgcgctcgatctgctcaaggcc

SEQ ID NO: 36132 - DNA, 260 bp, Unknown
  Description of Unknown: RightRegion for integrase B10133 sequence
tctacgatagaatatagtcgcgaacgtccaggtgaatttatactagatatagagcttctctgatacctactaccacatatagtaggtattctttaacacatacatatccatcataagtatcttcctttcgacagatgacagggaacgttcgctgtgtaaccaaattccgaagtattccacggcacaacagttattcccgtttcccgggatgctccatgccagttgttgtacgtactggaagtatcgtttacaaaattatc

SEQ ID NO: 36133 - DNA, 260 bp, Unknown
  Description of Unknown: RightRegion for integrase B10134 sequence
attgtccgggctgtcgtccgggagtgtacatgggacggtgagaccctttttcttagactctaatcttcactatttcataatgcgtatgagtaggatgcatgatgaaatagtgaagatttaaaaaagagcgacatggccgaagcctgtcgctctttggatccgcgccggagcataggctccggttttattttttcatgtttttgatggctgccagggtcttcttgccgaactttccattgacttccaggccggccgccttc

SEQ ID NO: 36134 - DNA, 260 bp, Unknown
  Description of Unknown: RightRegion for integrase B10135 sequence
cccgagatgagagcgcgaacaggtcagcagacaagagaaaggagcaagaaatgccgaaaataacgattatcccgcagaaactgaataaggcaactttcatgccgctaaatcagtctgtaaagcggagagtggcaggatacgcccgtgtgtcaaccgactctgaggaacagcggacatcatacaccgcacaggtagaatactacacgaattacatcaaaagccggtcagactgggagttcgttaatgtgtatacggatgag

SEQ ID NO: 36135 - DNA, 260 bp, Unknown
  Description of Unknown: RightRegion for integrase B10136 sequence
actttcctttctggtcgcgctctaatggttgcgaaggtgtcacgttcccgcctttcctattgatgacctaccttagggcggaaacaaaaaaaagagagcggcttcggccgctcttttcttttagtcctcgatcggatcgtccgggaggattatcggctcgggctccgggttgacctctatcggtctccagaaccactcgcgctgcttctctctgatgcgttcccgcagcttctccagaagagtctctctcattgttcctc

SEQ ID NO: 36136 - DNA, 260 bp, Unknown
  Description of Unknown: RightRegion for integrase B10137 sequence
agcgcgccgggtgataatctggagatccagctgttcccccgtatccccacagatgacgattgattatttgcctttttaaggatagcatggcatgaacaatgaattatttttatcttgctatctctattccaaaagaaaaaggcataggtcctcgatccgggcatctccggatcgaggacctatattaatctccgtttcgaccgtcaacgtcgggcggtttgtctttcgtctcccgcatggtctccagcttctctttaatc

SEQ ID NO: 36137 - DNA, 260 bp, Unknown
  Description of Unknown: RightRegion for integrase B10138 sequence
atgcacttatccgaacacatcatatttgtaaatggtgttattgggatgatcgtgcaaagataaaaaaatccctctccagaccggagagggatctttttattttaccacatgctcatagtatttcatgagcttctgctccgggccggggccgtctttatcgagcagaaaagcttttgccagggcggcgtagaattccgggcggttgaggccgaactctacggcgacggggtagtagtccgagtacatcatgttcatggtca

SEQ ID NO: 36138 - DNA, 260 bp, Unknown
  Description of Unknown: RightRegion for integrase B10139 sequence
gggaaaggaaacgagattggttttcagctagacattttcccaaaaattcaaaaaaatgattaatgacatcttctatgtgccagttcgctagcgcaatgatgctatcattaaatttaaaaagaaactcccggggaattaaccccgggatattttatacttttttgatgtattttgcagaaacaaaaccgaagtactttccggcaatgcggatgtagtaccagtcggctttgtcttttgctttaatgatatcacatacatcg

SEQ ID NO: 36139 - DNA, 260 bp, Unknown
  Description of Unknown: RightRegion for integrase B10140 sequence
ccggcatacatcttcgtcaatggcgtgttcggctgcatcttccctcggaacgatgtagaatgaccgggtgatttcacccggtttttcatttttcggtgtgaaattgaaaataaggctcatttcactttcaactttgcaaggcagaccgtcgcgtgatggtctgcctttttcgtatttcttctaaagcacgcgcgcgggcgcgggcgcgtgagccaacccctcacgcaaccccttcaaaagtgaatgaaattcataaaaaa

SEQ ID NO: 36140 - DNA, 260 bp, Unknown
  Description of Unknown: RightRegion for integrase B10141 sequence
gaaccactccgcctgatctggtacatgcacctggatgtgttcgccattgaaggcctgctgtaaaagaaataccccggaagctcaatagcctccggggtaaaatgttggataatgttggataatgttatgtgtagctgttactcctcgcgcggctcccatccgctgcacttcatccctttgtcatcaaagtttatggttttatcgccggtatgagtgcagtcaatgttatgctttccgttctggatcaaagtcatgcttcc

SEQ ID NO: 36141 - DNA, 260 bp, Unknown
  Description of Unknown: RightRegion for integrase B10142 sequence
gaaaaacgggctgccgctgctgaatcatcaaaaacaaggagatggaaaaaatgccaaaagtaacaaaaattccgccaagattaaatcctgccacttttgcacctttggagagtgttgaaaaacgaaaagttgcaggatatgcaagagtttcaactgattcagaagaacaaaaaacttcctatactgctcaagtggattactatacgaaattcattaaagaacggatcgattgggaatttgtcggagtttatacagacgaa

SEQ ID NO: 36142 - DNA, 59 bp, Unknown
  Description of Unknown: RightRegion for integrase B10143 sequence
tccgaaacggatatcaccgcttttggcattttcgggaagaagggactcgaacaatttaa

SEQ ID NO: 36143 - DNA, 260 bp, Unknown
  Description of Unknown: RightRegion for integrase B10144 sequence
agtggacccccgtcgagattcagattttttatttgtgatgctgtaatagcatctcgggggtgatgaacgacaccctcggtgcttatactgcataataataaaagtggagaccgtcaaggcctccgcttttttataatatgtattccgcatccttttcaaaagatttcacgacggattcaaagtcctgcgctttcagggtttcaagccatgcggcgcggttggattttaattcaggatgctttccgatctccgcttcaatt

SEQ ID NO: 36144 - DNA, 260 bp, Unknown
  Description of Unknown: RightRegion for integrase B10145 sequence
cgctccgtcccttatctgctagagccgttcagggtcgtgctgcgccgcgcaagtcgggaatagtactcgcccaaccgcacatcgtctacctcccgggtgtactgtctacctcatggacgtacccgtggcaggaaaagccacctctcacgcgtaggtcggcatctcgtcgtagatccgaccccccaagtcccggccgttcgccttcttggacctcttcacgccgtccgccccgtacgctccccactgtttgaagaagaagg

SEQ ID NO: 36145 - DNA, 260 bp, Unknown
  Description of Unknown: RightRegion for integrase B10146 sequence
tggacagacgagatgaaagaaaaagcaaggaggagaggtttatgcaccaagcaacagaagtagttgttatacccgccaaggcggtcgaggttttttcaccgcttaccggtacgggggtaaaaaagcgggtggcggcgtatgcaagggtttcgacaagcagcgaggaacaggaaggcagctacgaagcccagattaattattacaccaaatacatcaaggaaagaccggaatgggagttggtggatatctataccgatgag

SEQ ID NO: 36146 - DNA, 260 bp, Unknown
  Description of Unknown: RightRegion for integrase B10147 sequence
gcggtggctcctggttgcaggatgcaccacgagaacgggctgcggatccgcctggttgcgtgagctggccagcagcggctccccggccgagacaggctgatcgccgggaaacttttcgagcgctcttttggtgaggtagccgacacaggcgacctatcagcgcgtcgttgctttggattttgatgcggatggctgggaaatccgcctggttgcgtgaccgggccggcgggagcggcagccgttcggcgatcccgaacagc

SEQ ID NO: 36147 - DNA, 260 bp, Unknown
  Description of Unknown: RightRegion for integrase B10148 sequence
cagccggacgacccggacgacgcggaagcggcagagctggcggcgctagtactgacggtgtgatctgagacacattgggtccggcttcggtcgggccctctgtgttttggtgaggcttacctaacttcactcagaggtgccagactggtcacggagcgaatccgtccgagagatcagcgcacaacagcgcaaggggagcgggcgcgagcgtccatcgggtcaccatctctgacctgcggtttagtacgttcggacgttca

SEQ ID NO: 36148 - DNA, 260 bp, Unknown
  Description of Unknown: RightRegion for integrase B10149 sequence
gcaggattcggacttcatctgtccgggaggatcgagatcccgctccgcttgaggcgcgcatgatagagccaggaggccctgcggcgcaaggctgaacggatcaggtcgccccaatgcatggtgcctcgcggccgattcccccccgtcgagacgacccagacccacgccgacgccctggccgaccggctttagcccgcaacctcttgcccatggatgtagcaggcccagttgaccgtggtggccgcagcgcccgtggcttc

SEQ ID NO: 36149 - DNA, 260 bp, Unknown
  Description of Unknown: RightRegion for integrase B10150 sequence
gctggcgggacttctaccgaactggcggcgttgtttgcgctggcgaaactatttgtggcgtgagtgctaaagcttaattttcaatatttggcctgaaatttttacggttttttaaagccaaagcctcctgaatgctcatatctttttcttgtgttgcgctccagttgtcccgcatcatacgggcaaattcatggccgctttcaaaaggcacaagcatcgggaataaatacagggcttcgcacatttgcaggtactgtttt

SEQ ID NO: 36150 - DNA, 260 bp, Unknown
  Description of Unknown: RightRegion for integrase B10151 sequence
atcgtccgctccgtcgtgaaatcctgcgcctgggacggggagacgctttttctttcgctctaaacctcacttttttattatgcgttcgctccggccgcataatgaaatagtgaacaaataatgcgccgttttatggttataaaattgttaaacttatagttataaaaaacttgtactttgtggctggcagagctaatatacagacagttaaaggaacggcggaaagcctgaatcaaggaggacaaaatcatgatgaacat

SEQ ID NO: 36151 - DNA, 260 bp, Unknown
  Description of Unknown: RightRegion for integrase B10152 sequence
attgaaaatgatgagcaaactaatcatctgctactaaaaataaaaggtttaattgctgcataaacaaaaatttagacgagccaaaatgagcaggaaggcccttaaaaatattttcatgatagtttatatgtccgcaatcaaaaaaaccctattcaagcgaatagggttttggttacatcaagaagaacagaaccatgaaaaattagtgaatcttaaatgtttgttttcgatttttattttttataaaagaaatgtgcacc

SEQ ID NO: 36152 - DNA, 260 bp, Unknown
  Description of Unknown: RightRegion for integrase B10153 sequence
ctaacccttactatatcaaagaatttcatatcaagccacaatttaccaaagaggtttttataagccggggtctcccggcttatcatttgtacatcgccagcatcgcctgcacttccgccgtatcctcatcgatatcatgtatccattcattgtaggccgcatggattccatggatgtactgcgcagcttcaggcagctcggcaaaatcccgcatatgcttatcaaagatctgacgacccatcatattgaatttcagatgg

SEQ ID NO: 36153 - DNA, 260 bp, Unknown
  Description of Unknown: RightRegion for integrase B10154 sequence
tctggtgtactaatgataacacatccgaacacacaggtgtcaatacatcggattgccatctgaccggatgaaaaaagaccgctggaaagcggcctttttctttttctgaaatgaaaaaacccgccctttcgggcgggaggctttcgccttttttaccgctggccgatccgatccatcagctttttgatgtccatgcgtgtcgcttcatccggtgcctcatccatcattcggcgcagttgatcgttccagtctccggtcct

SEQ ID NO: 36154 - DNA, 260 bp, Unknown
  Description of Unknown: RightRegion for integrase B10155 sequence
aatggtgtaccagacgtgttacatccgaacacgcgggtgacggccttccggatcgccatctgatcggatgaaaaaaagaccaccaatcggtggcctttttctttttgcttagtccagcgggatcagctgatccatcacatcatccggttccttttcccatcctcttgtgatcatttccagttctgcttcagtgatgatcgtttcctccgttgcatcatctccccaaagatccaaatactccggtttgattttgtatttct

SEQ ID NO: 36155 - DNA, 260 bp, Unknown
  Description of Unknown: RightRegion for integrase B10156 sequence
tacgcaccctatttaatagggcaaatcgtgtttgcaatcaatgtaaaacaccgcttcgagtgaggcggtgtttgttttgtaaattataaatatgtagcgttgttatcgtcatcgtctttcggcttttccttgaagaatagtcgtttaacgaaatcgagtaccattgtgccaagagcgttcaaagaagtagttttgaatatattatagaacgtctgattgagagcataaatcgcccctgcaattacaatgaaattatccca

SEQ ID NO: 36156 - DNA, 260 bp, Unknown
  Description of Unknown: RightRegion for integrase B10157 sequence
atcgccagggaggtgatccagtcagccacatgggacggcgagaccctttttattatgctttgatgttctcttttttatcctgagcgcatcgggtagcaggataaaaaagagaaaaggcccaggagcagcgaggagctcctgggcctattattttatttaattattcgatgtagatcttgccgttgaagtaagcggcgagccatccggaaggacagcggatccagatgttcgcgccgactttcttgacctccaggcaagtg

SEQ ID NO: 36157 - DNA, 207 bp, Unknown
  Description of Unknown: RightRegion for integrase B10158 sequence
atcgctcgcgctgtgattcaggagtgtacttgggacggggagcggctttttattacgctctaaacctcactatttcataatggtggggttccggtctcatacgaagagccgtcctgataagatctcttattgtaattggagtaaccccatcggtatttgcatttctggtctcaagccttactatatttttagctcccagaagctgca

SEQ ID NO: 36158 - DNA, 260 bp, Unknown
  Description of Unknown: RightRegion for integrase B10159 sequence
ggtcagccctatgtttgcttaagtgccgagattagccgaaaggatttaagaaaccgggcctaattgccaggggtatggttgtggaaaagtgcttcttgtatatttgactttataagaaggtgagttattatgtggacatggaagaacgattcgaaccgctcgacccgctcaatatcagccagatggacgaattcttcgaagccttggctgctggagacgtcgagtactaaccaagaaggcagagcctacgctctgcctcc

SEQ ID NO: 36159 - DNA, 260 bp, Unknown
  Description of Unknown: RightRegion for integrase B10160 sequence
gctatctctttgatatggaatttctgccccagctcatcgatgaagttttcgataaaaccatagtggacaacattgccctccgtagttttcagatagccctgccgctcccacacatcgtaaggaacatgatcacgccttacacggagaggcaatgtttcctcaggcaaccagaagtaaggcataacgtagtaatgttcatcttcttccgttggcggaaacaccaaaacaaatgctgtaatatccgttgtgctggaaaggtc

SEQ ID NO: 36160 - DNA, 260 bp, Unknown
  Description of Unknown: RightRegion for integrase B10161 sequence
gacggtgcaccatttgttacacatccgaacacgcggatggtcatttacacgatcgccgtgtaaatgaaaaaaagggccccggcacgatgccggggcccttcttattcttcggacagttccctcttgatgtcgtatttcttgaatgtcagttcatacgcccccattgcactcagcgccacgatgaaggcattaaccgccgtcaagatggcgctttgcggcgtcaggcccgtggtaaatgccgtagcgatcagcaggatcac

SEQ ID NO: 36161 - DNA, 260 bp, Unknown; identical to SEQ ID NO: 35632
  Description of Unknown: RightRegion for integrase B10162 sequence

SEQ ID NO: 36162 - DNA, 260 bp, Unknown
  Description of Unknown: RightRegion for integrase B10163 sequence
gtaccggactatgtgactaaggttggacatctgaaacccttttcctcccacgagactcaatagttccatcaggctttacacctcttattctgaagtgctgctcaaattcctcttttgtgattgtgatgggtttgggttcttcgtattggattgtctcggcaagggcaagtgcaatctcggaagcagggaagttcctcaataggtaattcccaagttcttcaattgtgatttctccggtcttagcctgtttgtaaatttgc

SEQ ID NO: 36163 - DNA, 90 bp, Unknown
  Description of Unknown: RightRegion for integrase B10164 sequence
atcgctcgcgctgtgattcaggagtgtacttgggacggggagcggctttttattacgctctaaacctcactatttcataatggtggggtt

SEQ ID NO: 36164 - DNA, 92 bp, Unknown; identical to SEQ ID NO: 35629
  Description of Unknown: RightRegion for integrase B10165 sequence

SEQ ID NO: 36165 - DNA, 260 bp, Unknown
  Description of Unknown: RightRegion for integrase B10166 sequence
tccaacagggacatcaggtttgaactgaaaaacggagaggtaaggacatggcaaagagagtaagacagataccagctacgttgaaccgcttcacttcttcaccggtcttttccacagtgaagaggaaagtcgccggatacgcaagggtatccacgaacaatgaagaacagcagtccagttatgaggcacagatggactactacagatcttatattactagccggagcgactgggagttcgtcgggatgtattctgatgag

SEQ ID NO: 36166 - DNA, 260 bp, Unknown
  Description of Unknown: RightRegion for integrase B10167 sequence
cccggcgcacatctgacccttgaaatctacccccgccagccctccgacgacgatgatttttaatgcaaaataggggtagcatggcgggtgggatgaatcgcgcccaccatgctacccccaaaatgaacgaagcagccccgccgatctggcggggctgctggtgtgtgggcggggttggtgccgtcaagcacccatgcctgcgcgcagcaggcgttcgacgcaggcggtcaggctttcgtcggaggtggcggcaaggtcgc

SEQ ID NO: 36167 - DNA, 260 bp, Unknown
  Description of Unknown: RightRegion for integrase B10168 sequence
tcattggcgatcaaggaggcacttaacggtggaagcaatacagaaacgggtaacgaaaattgagcgagcaacggtcgcgttgggagaaaacaatgttcgcctcctcgcgaaacgacgcgtcgccgcgtatgcgcgggtatcgaccgacagtgacgagcagttcacaagcttcgaagcacaggtcgattattatagccgccagatcgccgctaacccggactggacgatggtcgaggtttatacggacgaaggtatcaccg

SEQ ID NO: 36168 - DNA, 260 bp, Unknown
  Description of Unknown: RightRegion for integrase B10169 sequence
atcgttcgctctgtagtgaagacttgtacatgggacggcgtgaatctttttattacgctttaaacctcacttttttattatgcatccgaccccatgcattataaaaaagtgatgtaatcaaatagcacgtatatttcacaatagcgctacatgtctatactatcagatattacgtgtatttggttctgttcattgcatacattcgcattattaactgaattgtcgcacatatacgcatgttgttaaaaataccccctcaa

SEQ ID NO: 36169 - DNA, 260 bp, Unknown
  Description of Unknown: RightRegion for integrase B10170 sequence
atgaaacaagctgctgccgagcgaacacgcattcaaaggagggaaaaacaatgccaagagtaacgacaataccagcgacaaaaaacaagttcacggcgctaccgacagcgtccattgcaaagcgacgcactgccgggtatgcccgtgtttccacggataaggacgagcagttcaccagttatgaggcacaggtcgattattacaccaagtacattcagtcccgagaggactgggagttcgtcacggtttatacggatgaa

SEQ ID NO: 36170 - DNA, 260 bp, Unknown
  Description of Unknown: RightRegion for integrase B10171 sequence
aaaaccagatccagaaaaaggagtaattctcatggaagccatcaagaaagtcacgaagattgatcgtgcggtcgttggcaaagcatcaacgcatcaagcgattgcaagcctgcgtcgagttgcagcgtatgctcgagtttcgactgacagcgacgaacagttcaccagcttcgaggcgcaggtggattactatacccgccagatcactgctaacccagactggacgatggttgaggtttatacggacgagggtatttccg

SEQ ID NO: 36171 - DNA, 260 bp, Unknown
  Description of Unknown: RightRegion for integrase B10172 sequence
gaggggaatcgaacccctgtccgaaaacccgttcatgaaagtttctcccatcagagtcattaatttgacattccctctgccaagcgcctaatgacaggctcatggttttagtagcttaattaggttcttttactacctcaaagcattggtagaaaagttcctcgcccaatcgttgcccagaccctaagtggcgagttgcctaggaaggacaccgcagcctaagctgcgaaagctaaattatcttcagcgtttaatttaat

SEQ ID NO: 36172 - DNA, 260 bp, Unknown
  Description of Unknown: RightRegion for integrase B10173 sequence
gtctatgatgagatgctggtggtcgagttcaaatccggtctggagatcgaggttgacgcataagaaattaccatttacggcagtcggacaagttccggctgtcttttttgctttaggggatgaaatccggaccgttttctgatacaataaattgaacagatagtgaaactgcattgaacagtatgtaaggcggtaaggtatgcttaagaataacattgaaatagatgtcaaagtaaaatgcgtggaagagcagatcacgc

SEQ ID NO: 36173 - DNA, 260 bp, Unknown
  Description of Unknown: RightRegion for integrase B10174 sequence
tacgcaccctatattgtagggcgaatgtcatttgcaatcaatgtaaaacaccgcttcgagtgaggcggtgtttttctttattagtcagtttttttcttgattttttcaacaatccaatcaagcactttaattgccaaatcctttataggcgtaatcttgaagatattatagaatgtttgatttaacgcccacatagcggcggcgaccgatagtatgtatttcatctcgaattgacctacaattaaaaggtatataatcgt

SEQ ID NO: 36174 - DNA, 260 bp, Unknown
  Description of Unknown: RightRegion for integrase B10175 sequence
cagcgcccccagtcggtattatattgctactcacaacttttggaaaccttatgtattttgtaataaaaaaacgggtgccagtttttcccgatatgaccacacccgttttctctgctttcgcagatatttcaattatatcaccaattcataattcgtcagctatttttcgcataaacctcgatattggcagaccttctttttcagctcttgccgctatcttttcatgtgtgactctatccacgcgaatcatgatgctgtcg

SEQ ID NO: 36175 - DNA, 260 bp, Unknown
  Description of Unknown: RightRegion for integrase B10176 sequence
tgtagtgtaccaatagtaacacatccgaacacagctgtcacgatcttccggatcgcgatctgatcggaaagaaaaaagcaaccatgcggttgctttttttgtactaaaaaaccgccccgaagggcggaaaggatgtgcgcttcctgcacgtccttttttagtttgccatgcgatccataagctttttgatgtccatccgggtcgcttcgtccggtgcctcgtccatcatcatccggagatgctcatgccagtcaattccg

SEQ ID NO: 36176 - DNA, 260 bp, Unknown
  Description of Unknown: RightRegion for integrase B10177 sequence
gacaaaatcgaattcagccgtgaaaatggattagagttcatccttgatgtttatttgaagtgatacaggggcatgatcagaaccgaatatatttgtttcaatcgtgctttctgtaatcatatccgctgcccaatctgataccaggaaataatctattcgccacccggcattcctggcccttgcatttcgcatgtaactccaccaggaatattccaccttatccgggtacagatggcggtaagcatccacgaatccagcac

SEQ ID NO: 36177 - DNA, 260 bp, Unknown
  Description of Unknown: RightRegion for integrase B10178 sequence
gaaaccgtcaccctgattaccggtcaggcgtcgtggattacccgcaaatggctgcccgcctagacctcacttaaatgaaggcgttttacacgttatgttaaactgtctcacaaccaagcggtatgttgaattaccgtgaggttgggtagttcaaaagtgcaaattctccactaagttctctagcttttctgtcgtaggccaatgctgcttccttagcggttgcatacccaccgagggaatagctcttattgtggtagcgt

SEQ ID NO: 36178 - DNA, 260 bp, Unknown
  Description of Unknown: RightRegion for integrase B10179 sequence
tcccagtccgtaccgcggagaatcgaactctgtgcagggcgcgggcgtaaagaaaacgcgtgagcgtttttagcccgcgggcgaggacgccggcaggcggccgaagccggtgcggatttgcgaagcaaagacgcggattctccgcgcaaagcctcaaccctatatagatgcgatgtcgatcccgcgtctgctcccgatcccagcccgtcaacggatcctccaaaaccgcggagaatcgaactctgtgcagggcgcgggcg

SEQ ID NO: 36179 - DNA, 260 bp, Unknown
  Description of Unknown: RightRegion for integrase B10180 sequence
gaacgcatctatttcagccgggagaacaacgctgaattcttcttagacatccagacgaagtaacacagggcaatgatctgacccctgaatgtccgttaggatgtcagcttcgacaatcttgtccttcgcatcctctgatgcaaggaaatagtcaatgcgccagcccacgttcttttcacgcgctttgaacatgtacgaccaccacgaatacttcacttcgtccgggtgaagcgttctgaacgtgtcaacgaagccagcgt

SEQ ID NO: 36180 - DNA, 260 bp, Unknown
  Description of Unknown: RightRegion for integrase B10181 sequence
gtttgggatgaccatttcaccatcgaattgaaatccggtgttagtatcgatattgatgcataagtcccatagatgcacgaaaccctctcgaccatgatggccgggagggttcttttgctacttgttttcttttacaacaaaatctacagcgtttttctttatttcttcattatatcgacgcaccgcatcttcagtaatatgtgttatataaaacttgtcatctgaatccgtattctttccctgagccattagaactctag

SEQ ID NO: 36181 - DNA, 260 bp, Unknown
  Description of Unknown: RightRegion for integrase B10182 sequence
gaaaccttcactttcaatatgaagtgtgggctcaaattaacagaaagggtggtgttagaatgacgcacgttccatacggatacaaaattgaagctggggttgcaaccttcaatgatgatgctccggcgatcagaaagctttttactaacttcattgagtgtaaatcaatgagagctgcggcaaaaacagccgggataaataaaacgcattcagtaatcggcaggatcataaagaatgagatttatcttggaaccgacttc

SEQ ID NO: 36182 - DNA, 260 bp, Unknown
  Description of Unknown: RightRegion for integrase B10183 sequence
atcgtccggaaggtgttccgggtctgcacgtgggacggcgagaccctgcggctcgggatttaatttttgttccgaatctcactttaatattatgcgttcttcaggtcgcacgataataaagtgacttaaagtgacttagcctctctgacgccacagaaggcgttataaggggcttttcattttaggcgaacacttgctcgaaaagcgcgtaaacgtctgaatctgccaaagctgtgaagcgacgcggaggttataagcgc

SEQ ID NO: 36183 - DNA, 260 bp, Unknown
  Description of Unknown: RightRegion for integrase B10184 sequence
agaaacgaaatcaagtttgtaatgaaatgtggtctaacattcacagaaaggattggtgattagatgggccatacaccctttggctatcggattgaaaatggcatcgcaatcatagacgaacctgctgccgcaaaactccgacagctttataaaaattatctgagtggcatgtcattatcaaaggcagctgctgaagctgggataccaacctatcatggaacagcaaagcgattgatgggaactgtccattatcttggcga

SEQ ID NO: 36184 - DNA, 60 bp, Unknown
  Description of Unknown: RightRegion for integrase B10185 sequence
gcaataaaaaacacattcgatgtgttcgaatgtgttttaaatggtgggcgatacgtgact

SEQ ID NO: 36185 - DNA, 260 bp, Unknown
  Description of Unknown: RightRegion for integrase B10186 sequence
tatccgaaccaccgaatcacaatctacgtgatcccgttggaaccggataaaaaaagagcctgaggcatttgccccaggcttttttcattcctccgcgggaggtttctcatcatcgtctttttgattctcgctggccgcttccgctgccggcgttttgttctgcgctgccgttgttccttcgcctttgctgcgcatgatttcaagcgcctgcagcaggatcttcgggataggcacacccatggccgtcacgttttccagta

SEQ ID NO: 36186 - DNA, 61 bp, Unknown
  Description of Unknown: RightRegion for integrase B10187 sequence
cccccggaagatgacgatataacgtcaaattccgagggttctaccgcgttgcggttggtgg

SEQ ID NO: 36187 - DNA, 260 bp, Unknown
  Description of Unknown: RightRegion for integrase B10188 sequence
agaaatgaaatcaagtttgcgatgaaatgcggtctgacattcacagaaaggattggtgattaaatgggccacacaccctttggttacaaaatagataatggtattgccgttatcgatcaaccggctgctgacaagctcagacagctttacaaaaattatctgagtggtatgtccttatcgaaggctgcatctgctgccggaattaaaacttatcacggcactgctaaacgattgatggaaacagcccattatcttggcga

SEQ ID NO: 36188 - DNA, 62 bp, Unknown; identical to SEQ ID NO: 35746
  Description of Unknown: RightRegion for integrase B10189 sequence

SEQ ID NO: 36189 - DNA, 129 bp, Unknown
  Description of Unknown: RightRegion for integrase B10190 sequence
tcaggtgtccttttttggtgcgtaattagaggggacttgaaccctatgagggtttttgcgtgaaaaaatatgccggtggcatgttttttagcaaaaaggtgcgcagtcgggtaccgaagccacaggctt

SEQ ID NO: 36190 - DNA, 260 bp, Unknown
  Description of Unknown: RightRegion for integrase B10191 sequence
ggaagcatcgcatttataatcgactttgtaatcagccgcccggcctcgcgccggagcgcataagaaaaagcctcgggaaattcccgaggctttttcttatttcgctatggccacaccgacggcaaccgcgaaaagcgcttcccagatgttccgctgcgtccgcagccgtccttcgattttatcgcgttccttctctgatttccgaaatgatgccctggcattctgtaactcggcgttggctgtcctcaatgattcgtcga

SEQ ID NO: 36191 - DNA, 118 bp, Unknown
  Description of Unknown: RightRegion for integrase B10192 sequence
atcgaacactttcccgatattttaactcacctggaccgcttactggccatctttgccgcttaaaaactacaaaccccatctttcgacgggggcctgtagtaagtatggaaatgctaag

SEQ ID NO: 36192 - DNA, 61 bp, Unknown
  Description of Unknown: RightRegion for integrase B10193 sequence
catccgaaacccaacccagcactaattcgcaagtttgtcagcaaaattgtaccagatggaa

SEQ ID NO: 36193 - DNA, 260 bp, Unknown
  Description of Unknown: RightRegion for integrase B10194 sequence
cattccagaaacgatatccggtttgaactgaaatgcggcctgacgctcagggaaaggaagtgaggatatgggacatacaccatacggatacagaattgagagcggttgcgctgtgattaacgaagaagaagccgctaaaatcaggaacctatacgagaattacatcgccggaatggcacagtcaaaagctgccatcgaggcaggcatcgagacctaccacagctcagccaagcgcctaatgcaaaacaggcactaccttg

SEQ ID NO: 36194 - DNA, 260 bp, Unknown
  Description of Unknown: RightRegion for integrase B10195 sequence
cgcactgagctcggatttgagttcacttgcgggcttgtttttcgagaggaagtgaaccgatgagaagcataccatacgggtacaaggtgatgaacggcagggcagtcatcgaccaggtagagggaaagaaggtgagagatgcttttcagatgtatgctgctggaagctcccttgctgggatcaaacaggccctggagatcaaccgttaccatgccggcatcgacaacattctgaaggatcgaaaatacctgggcacagaa

SEQ ID NO: 36195 - DNA, 260 bp, Unknown
  Description of Unknown: RightRegion for integrase B10196 sequence
agaacggaaatcggattcgaactaaaatgcggaattactctaaaagaaaggttggtgagataaatgagccatataccatttggctaccgtattgaaaacggaaaagccgtaattgataaagaggctgcagaacagataaaaacattgttccaatcttacctgagcggcgattccttggcgacagcagctaagaaagcaggtattaaagctttccattccggtatcggcagaatgctacgaaatacccgatacatcggtga

SEQ ID NO: 36196 - DNA, 260 bp, Unknown
  Description of Unknown: RightRegion for integrase B10197 sequence
cgaacggaaattggattcgaattaaaatgcggaatcacacttaaagaaaggctggtgagataaatgagtcatacaccattcggctaccggattgaaaatggaaaagccgtaattgataaagaggctgcagagcagataaaaacattgttccaatcttacctgagcggcgattccttggcaacagcagctaagaaagcaggtattaaagctttccattcaggtatcggcaggatgctacgaaatacccgatacctcggtga

SEQ ID NO: 36197 - DNA, 260 bp, Unknown
  Description of Unknown: RightRegion for integrase B10198 sequence
gccattgatacaaagggcaagtatcacgtcaccgaaggaggatacgtgggcaaggcggaatgaccccgccgcacagattcagttctctttgtcagggcgtatcaaacttgaccgcacgtcccccgcattggacaccacactgccagtgcggtcaaaggtcttgttcagtttcgggttgtagtgcccaagaagggagttggaagcggagcggatttccttccgatattcgctcacgtcgttttcataaccaatcacgctgc

SEQ ID NO: 36198 - DNA, 260 bp, Unknown
  Description of Unknown: RightRegion for integrase B10199 sequence
gaaaataggagagtattaaaatgggaaaagttagagtcataccatcaaccatcaatccactaacacagcaaagtatccattcgtctgaaagaagaaaggttgcagcttatgctcgtgtttcaacggactccgatgagcagtatagttcttatgaagcacaggttaagtactacaaagatttcattcaagatagagttgactgggattatgtgaacgtctatgcggatgagggcatatcaggaactagtactaaacgcaga

SEQ ID NO: 36199 - DNA, 260 bp, Unknown
  Description of Unknown: RightRegion for integrase B10200 sequence
gccgcgccaaggcgatcggcgctgtggctggcctacggcgtgtcggcattatcgcctgtctgatcctggccatcgacccgcgtactgttactgcggacggcatcgcccatgcgatccatctcatctacgtcgagccgactggcgccatcttcacacccgctgagcaggccgctgcgcgatcgggcatcgccggcgccgtcgccttctggcaggatctggcgccgacccccgtgccgctgatgatcgccgacgagcggatg

SEQ ID NO: 36200 - DNA, 260 bp, Unknown
  Description of Unknown: RightRegion for integrase B10201 sequence
caggaggaaattggtttcaaaatgaaatgcgggttgaacttaagggaaatgctggtgaaataatgagcaatataccttttggatataccattcaaaacggcagggctgtcgttaatgaagaggaagcagttaagattgagaaactatttgaggcttatctttccgggctttctttaaccgaagcagcccaaaaagcaggtattaagcgttaccacacatctgttgcaagaatgctttcagataaacggtatgttgaggac

SEQ ID NO: 36201 - DNA, 260 bp, Unknown
  Description of Unknown: RightRegion for integrase B10202 sequence
tgtgccccaggcgggaacttactcgaacacctgctatcattggccaatgtttttgcagcataaacccccacccagcccccagtttcctccgaggaaactaaaaagtactcaaaaagggtacttttgctacgaagagatacgtagtctattaacaactgtttacgaaacattacgtaatacactaacgccagtttacgaaaagatacgtagcaggctttttaaataattactcaccgctcccaacttccgcccttccattt

SEQ ID NO: 36202 - DNA, 260 bp, Unknown
  Description of Unknown: RightRegion for integrase B10203 sequence
gtcccgttcgacccagcatccatccggatcgagtgggtcgccacgcgaggcgcacgtaagtagacgctcaaattaatcgatcccaccgacgatgccgttgccttttcggcaacggcatcgctatatcttccccgctcttgcggccgggtcctgttacggtgacgaaaagatggccattacggaggtcttgtcaggtgacgttacatggacacaggagatacagaggcacaggcccagccagcaggcgcagatatcgatga

SEQ ID NO: 36203 - DNA, 260 bp, Unknown
  Description of Unknown: RightRegion for integrase B10204 sequence
ttgggcgagtgcccccggcggtctccactccatagtctaaacttcgactttgtcctcacctgagtcggcctgctttgcccttgcctccgccacctggcgcaccaggttatcacgcacggcagcaagaacattgataaccacctccgccgggacctgaccgccgccgatgacctggagagcgctctctccggaaagcgggtcatggctgaccgccaggtggatgaccgggttctgcgtccgcacaatcagctgctcaacgc

SEQ ID NO: 36204 - DNA, 62 bp, Unknown
  Description of Unknown: RightRegion for integrase B10205 sequence
cgggaggtagttgggtttgtattaaaatgtggaatcacactgaaagaaaggttggtgaatta

SEQ ID NO: 36205 - DNA, 260 bp, Unknown
  Description of Unknown: RightRegion for integrase B10206 sequence
ttcgtgagccagccgggcttcacgtcgcggcccacgatccgccggccgccggtggagggctagttgccgctctcggcggcctggtccggttgggccggtggccggtggtcgtcgaggcggatgagcttggggtccgccagggcgaggaacatgccgtcgacctccccggcgcgttcggcgaggacgccgtccttgaactggctgatcatgagcctgccgcgttcgtcttcgccttcgcggcggacggctgcgatctcggc

SEQ ID NO: 36206 - DNA, 260 bp, Unknown
  Description of Unknown: RightRegion for integrase B10207 sequence
agaaatgaagtccgttttattctaaaatgtgggcttacattcacagaaaggatgggcgattaaatgggccatacaccatttggctatcggattgagaacggcattgcggttgtcgatgaacctgctgccgccaaaatccgacagctttatcaaaattatctggatgggctttccttatccaaagccgctgcagaagctggaatcaaaacctaccacggcacggccaagcgcctgatggaaaatgaacactatctgggaga

SEQ ID NO: 36207 - DNA, 260 bp, Unknown
  Description of Unknown: RightRegion for integrase B10208 sequence
acggtcgagatgaaagctactgcccgtcaaaaagccctggaaaggaggaaccagaatgcctaaagttacaatgatacctgcaaccataaacccactgacacatctgccttcggtggcagcacggaaaagacgtgtcgccggatacgcccgtgtttccactgacagcgatgagcagttcaccagttatgaagcccaggttgattactacacaaaattcatacagtccaagccggaatgggagttcgtaaaagtctatacgg

SEQ ID NO: 36208 - DNA, 260 bp, Unknown
  Description of Unknown: RightRegion for integrase B10209 sequence
attaaagtaaatagaatatatgatatgattatgaaaatgaataaaaattctaaaaataaataagataataagatcattagattatattattttattattaattataaatgtataatttgtctgtattagcaatgtttaaaaatgaaagttggattataaaagaatggatagaacattatttattagaaggtgttgaacatttttatttaatagataatggttcaactgataattatgaagatataataaaaatatataat

SEQ ID NO: 36209 - DNA, 260 bp, Unknown
  Description of Unknown: RightRegion for integrase B10210 sequence
ttcgacaccttggagatcctgtctgaactggcacgccgcagtgagtttaggagggtcgcatgacagctatcgagacccatcgcagagcgctgatgcacatcgccgaagagacgaacattcagctcattcccattgaagaaattcgggtgcttaatccacgggcacgtaacaagcaagtgttcgccaggttggttgagaatatatcggcgttaggcctcaagcggccgattacggtcgcccctacgatgggcggcaccgaa

SEQ ID NO: 36210 - DNA, 260 bp, Unknown
  Description of Unknown: RightRegion for integrase B10211 sequence
aaggttaatcccttagagggaaggaactatgtccttgaagtaagaaaggagcattttctatgaaaaaggttattaccatagaagccacaccaactcgtgtttctagtaatgacgacagtacaccggctaaaaaacgacgtgtagcgggctatgctcgagtatcaaccgaccatgaagaccaaacgaccagttatgaatcacaaatgcgatactatacagagtacatttcaagtcggagtgattgggagtttgttaaaatg

SEQ ID NO: 36211 - DNA, 260 bp, Unknown
  Description of Unknown: RightRegion for integrase B10212 sequence
gacgtagttcaaacgcacgcaaggggagctgaaccggctgccaggctggtaggagtagcgtagccccagatgagggggcagcgtgagggaagaaacagcaggccccggcaagggccgggtgagacaggcagtcccagaaacactccaggtgcgcaagccgttttctggcctcttcccctggtcgcaggcagtagccgatgcgatcagggaagacatggcggcaaacggctatgatcccgccttcccaattgtggtttggg

SEQ ID NO: 36212 - DNA, 260 bp, Unknown
  Description of Unknown: RightRegion for integrase B10213 sequence
tctgccccgtccctgtttgacatcatgatcataaatttgtgcaaattacgcaaagccgcttaaaatcacgatttctgggcattatcctaaattttacgcacgattgagcccctccggtggagcatccccacgaaaaagtttttcgcgggaggggggatacccacccgggcgggggctggcgggaatccgtacgctatattctgttcacgctccgctaagggttccctatgcggcggagcagggcgttcgatctcgcgcag

SEQ ID NO: 36213 - DNA, 260 bp, Unknown
  Description of Unknown: RightRegion for integrase B10214 sequence
tcttggagtggtagcgggggtgcgctacttctccgagagaaggcggtccgcctcgccgcgtagggtactgcactcgggcgtccgctaggcggtcgtcggtcgaatcgttccgaatcggtatcagttagggctttacaccctcgggcgtattgccctaacctttccacatccccggcgcggtgccgggctaaccgaaggaaccgaaaatgaacagcacccctagcgattacacgtgccgcgtcgtcagcgaaaacggcaaa

SEQ ID NO: 36214 - DNA, 61 bp, Unknown
  Description of Unknown: RightRegion for integrase B10215 sequence
gagcaatcctgcgagttagaggagtatgacgagcaattagtaaggtggcttattgaaaggg

SEQ ID NO: 36215 - DNA, 62 bp, Unknown
  Description of Unknown: RightRegion for integrase B10216 sequence
tacatcacggtttatgagaacggagaaaaaacagttactttcagagatggaagtgtgatata

SEQ ID NO: 36216 - DNA, 62 bp, Unknown; identical to SEQ ID NO: 36215
  Description of Unknown: RightRegion for integrase B10217 sequence

SEQ ID NO: 36217 - DNA, 260 bp, Unknown
  Description of Unknown: RightRegion for integrase B10218 sequence
tcttggagtggtagcgggggcgcgctatgtcaccgagaaatcgccctccgcctgtccgcctagtctactgccggcgcccgtccgcggtgtggtcgcggtagaagatacctccgaaatggaatcagtagggctttaagccctcgggtttaatgccctactcttgcaccatacccggcgcggcgccgggcgaaccgaaggagaatcgacgatgcgtaagtaccacctcaagagcagcaagcaccacggcccgtcctgccagt

SEQ ID NO: 36218 - DNA, 260 bp, Unknown; identical to SEQ ID NO: 36181
  Description of Unknown: RightRegion for integrase B10219 sequence

SEQ ID NO: 36219 - DNA, 260 bp, Unknown
  Description of Unknown: RightRegion for integrase B10220 sequence
acgatatgcaaagacggcggtatggttttcctgtttaaggacgggagtaaaattacagtataaaatgagttaggggtgcgaaatgcaccccttatttttatgcaaagaaacggggaaaaacaccaaagaaacggcaattgaggaaagaaacggcatttctccaaagaaacggtgaaagaccaacgaaacggtaaaatgcaacccccaccccctccgtttctttgtactttcattttgtttctttgctctcttatttttct

SEQ ID NO: 36220 - DNA, 260 bp, Unknown
  Description of Unknown: RightRegion for integrase B10221 sequence
acgaacatgcgtttgtttatgtattcagattacttctctgtccgtattcgacgcattgcttaattactggtctgcaggtatcattttagacaacagtttatcgaccatccacagtacaacagaaattaaagtaggaaggaatgcggaatcacgaaacttattccaaccagtctctttttcagcatccgcttttagtgctgtagtataagaatcagctatctcctttactgcaggaagtgcagtatcttttaaccaggcaa

SEQ ID NO: 36221 - DNA, 260 bp, Unknown; identical to SEQ ID NO: 35549
  Description of Unknown: RightRegion for integrase B10222 sequence

SEQ ID NO: 36222 - DNA, 260 bp, Unknown
  Description of Unknown: RightRegion for integrase B10223 sequence
tacagccgaaaatcaatcggatttgtacttcactgcggtcttacttttaaggagagaatttaatgggacacacgccttatggatatcgaattgtggatggaagagcggttattgatgaagctgctgccacacagattcgtgagctttacaaaaattatttaagcggactttcacttaccaatgctgcaaaggaagccgggcttgacctacttcattccggtgctaaaagaatgatgcgaaacaagcactaccttggtgat

SEQ ID NO: 36223 - DNA, 260 bp, Unknown
  Description of Unknown: RightRegion for integrase B10224 sequence
cgaaccatgaatgttcgccgatccatactcattatcgacagcataaaaaaagaccggacgtgagtccggttcttttcatttaatgagatagtccttcgcgacttcgtatgcgtctccatcgacgacaccattctcgtaaccgtaatacgtccagcgttcgtgtcgcgaatctgtcagagtgacatggatcagcgcgacttcgaatctctccagtttgctcttctccttctctgtcagatgcttccacatcatgtcagcct

SEQ ID NO: 36224 - DNA, 260 bp, Unknown
  Description of Unknown: RightRegion for integrase B10225 sequence
gtactgattgtaacacatccgaacctcaggatcataatttacacgatcccgctggccggataaacaaaaaaaaccgccggaaaagctccgacggttttttcattattcatctattatgtcaggcggttttgcttcctttgttttctccacttccgggatgcctgccagactcgtcagaatcgacaggacacaggccacaccactcacagagagtgcacggagccagtccacttccgatgctgctgccccaactgcaatgc

SEQ ID NO: 36225 - DNA, 260 bp, Unknown
  Description of Unknown: RightRegion for integrase B10226 sequence
cgaactcagatgattcgtcgttccatactcatcattgagaccataaaaaaagaccggacgtgagtccggttcttttcatttactgagatagtccttcgcgacttcgtatgcgtctccatcgacgacaccattctcgtaaccgtaatacgtccagcgttcgtgtcgtgaatctgtcagagtgacatggatcagcgcgacttcgaatctctccagcttgctcttctccctgtctgtcagatgcttccacatcatgtcagcct

SEQ ID NO: 36226 - DNA, 260 bp, Unknown
  Description of Unknown: RightRegion for integrase B10227 sequence
tattcacgacaaaaaataggatttgttctgagatgtgatcttacatttgaggagatgatttaatgggacacacgccatttggatatataatcgttgacggaaaggctgttgttgacgaaggcactgccgaacaggttcgcaatgtctatttgaattaccttagcggactttctcttgtcaatgcggcaaagagggcaggacttaatatgcgacattgcggagtgaagaatatgctgcaaaacaagcactatcttggcgat

SEQ ID NO: 36227 - DNA, 260 bp, Unknown; identical to SEQ ID NO: 36183
  Description of Unknown: RightRegion for integrase B10228 sequence

SEQ ID NO: 36228 - DNA, 260 bp, Unknown; identical to SEQ ID NO: 36187
  Description of Unknown: RightRegion for integrase B10229 sequence

SEQ ID NO: 36229 - DNA, 260 bp, Unknown
  Description of Unknown: RightRegion for integrase B10230 sequence
aatgagatcgtcttccagctaaagtgcggactgcgtctgacagaaaggatcggtgagatatgagcagaggacacacaccttacgggtatcggattgaagatggctccgcggtcatttgcagggagcaggcagagcagatccggaagatctacgagggctacctcagtggactttcactaagaaacgctgccaaagaagcggggatgcatgcaacgcacacctccgtcagaaggctcctgcagaattcgcacctcctgggt

SEQ ID NO: 36230 - DNA, 260 bp, Unknown; identical to SEQ ID NO: 36229
  Description of Unknown: RightRegion for integrase B10231 sequence

SEQ ID NO: 36231 - DNA, 260 bp, Unknown
  Description of Unknown: RightRegion for integrase B10232 sequence
tgcgaggtggggctcgaactaaagtgcggtttgattcttagagaaagagtggtggaagaatgagtcacgtaccttttggatataagatagagaatggcaaagcaaaaattgacgaggtcacttccgcgcaggtccgaaaaatctttcaattctacttggagggtgattctctccttacaattgcaaaaaagactggggctaaagcatcacacccgggtattggcaagattctttgcaatagaagatatcttggggacggc

SEQ ID NO: 36232 - DNA, 260 bp, Unknown
  Description of Unknown: RightRegion for integrase B10233 sequence
cttcgttttcgtctgtacaggcacgtcgtcatttttacggttgatttactccataccgtgtaactcacctctcccggtggtcgctttgttgcgccgccgggttttgttttctccgatataaaaaagataaaaataccacggattgcgtagttttttattgacaatccacgaaatccgtggtatattattattaagaaatgaagagaacaaaaaacaagcaggagggtaataaaatgacagcgaaagaaatccttgaaatc

SEQ ID NO: 36233 - DNA, 260 bp, Unknown
  Description of Unknown: RightRegion for integrase B10234 sequence
agtaaactcaaactgccgattgtcgaacggtcctggcctagatggatattcgacgcggcgtaaaaataagccaccctgatttaatcagggtggcattttgcgttttatgcaaattactatagggatttcaccagcatggccgccgtgacaacttgccacagtgttcgttccagtttcaagcgtcgttcagtccgtgcgtgttccttttcggatttctcgtaggatttctgtgcttgattcaatgagttttgcgctatctc

SEQ ID NO: 36234 - DNA, 260 bp, Unknown
  Description of Unknown: RightRegion for integrase B10235 sequence
agaatatttataaaacaggttatagtcacccgtggcagtataacacttgaaagatacttttagtattttgattactagtgcatctgcaatggttaccaaaatgcctaaagttttattttccttccattataaatatgggttattcatgtgaccgatatctcaataggtattatggattaaataaaaaaacaattaaactccttttttatctgaaaatatttctactaatactccaataaaacatatccctatgaatattc

SEQ ID NO: 36235 - DNA, 260 bp, Unknown
  Description of Unknown: RightRegion for integrase B10236 sequence
gtacacgggcgccgcctgttactcgttcgaacaataaaaaagcccgccatgctgatgggataacacgacggactcggccgcacgattgcgaccccgaaataataaggcaataacagtataacaaaaaagcgcccggctgagtgtgaccgggcgttcttcatttccgggcggaggattgttcccggaatggatttataaaaaatttccatctttcatgcactcacgataaacgcgctctatattctcaatagccagcgcgg

SEQ ID NO: 36236 - DNA, 260 bp, Unknown
  Description of Unknown: RightRegion for integrase B10237 sequence
acgggatgcaaaccggtactggtggaaatcccacggggttccccggcgaatgtactgcgctaggatggtgccgtgccctacaagaacggcaagccgacgcccagccagttcaagcccgggaaccgggccgggaaggggtcgccgcgcccgcctggccgcaaggctggcctgacgccccagatggagcgcttcgcccgcgagtacgtcgtggacctggatgtcggggcggcggtgctgcgggctggctactcggccaagga

SEQ ID NO: 36237 - DNA, 105 bp, Unknown
  Description of Unknown: RightRegion for integrase B10238 sequence
agcgatccaaacctatttgacattgtgatcggaatattgtgcaacatgcgcatagcagcgtaaaatcccaatttctgggcattatccaaaattattcaaacgatt

SEQ ID NO: 36238 - DNA, 62 bp, Unknown
  Description of Unknown: RightRegion for integrase B10239 sequence
gatattaaagagggcaagaaaatcagcctcaccttcaaaaatggtgttcggattgatttata

SEQ ID NO: 36239 - DNA, 260 bp, Unknown
  Description of Unknown: RightRegion for integrase B10240 sequence
agcggaacgcgggacggctgggatgtcaagccgatgaatctgcaaatagaacttaatctctgatagacatcatgtcgggatagacgaatacaaaccaagatgatatacatagacaaagagaaccggcagagcgcttgccctgccggttgcttttattcctgaccgagtgcgtggatagccttctgaatcgcgtgctgcgcttcgggagaaacgtctcccatcatgccttccatttcaccgatcagcttgtccttcgcttc

SEQ ID NO: 36240 - DNA, 260 bp, Unknown
  Description of Unknown: RightRegion for integrase B10241 sequence
aagtcgtttattgaatcagtgctggtgtatgaggatggaagcatggacattcgttttttgtagtctttgtcgtactaactatgcaccgcctgtcggtactgctttgttagtacaatcaatatcttgtgattatccacacagttatcccctatatgtggacaaaataaaagcaaggcggcgcgttgtccgtcttgcttctcttttactccaaaattatcgacattattcttcgatgtattcaaccagcttcggatcgccac

SEQ ID NO: 36241 - DNA, 260 bp, Unknown
  Description of Unknown: RightRegion for integrase B10242 sequence
agggaagaaatcgtctttgaattaaagtgcggactgaaattaaaggaaaggctggtgggataatggcacatataccctacggatacaaaattgtgaatggaaaagcagaagtcgatgaaaaacaggcggaagcagtcagaaagctgtttgacggttacattgcaggacttggattaaagactgcatcagagaatgcgggtcttgatatttttcatggcagtgcaggcagaatgttaagaaacaagcattatcttggggac

SEQ ID NO: 36242 - DNA, 258 bp, Unknown
  Description of Unknown: RightRegion for integrase B10243 sequence
ccagacgtactttattgtatgtctggcttttttaatgaaataaagtcattttttaataattgaactttcagttattaaacgctccaaaaaaatatttttagtcaaagtctacggttcgtagacttttcttttatcttgtggtaaaatggtaaaaaataagtaggtttacttttcttctcgaattgtttacaattaaattaatgataaggaggaattatgagcaccataggaaagagaattgcaaaacaaagaaaaaag

SEQ ID NO: 36243 - DNA, 260 bp, Unknown
  Description of Unknown: RightRegion for integrase B10244 sequence
tacaataaaaaagaaataccaacctttgaaataacgttatatcctaagtttccaagtgtttaaaaacgaatgataacgtggtggaacgtaagaatgtgttccacgacgttatcatttgataacgtcgttttctttttttcgctctatatctttctttacgacattcactacataattatttgcagacctattttcagattctgcagctttctgaatatccccctccatttctattggaaaataaattaactttttaaaat

SEQ ID NO: 36244 - DNA, 260 bp, Unknown
  Description of Unknown: RightRegion for integrase B10245 sequence
agtgataagggtactggaggcgagccactcctaaccctatcactgtccattttaagaccttaattcacaatattagccatgtttaaaatcaatttgcgaacatactcacctttacacgtttttccgtcctgcgcatttaacaaccaatactccggagaacttactacctgcttttcacgcagcaccttgagagcggccataagctttttgtctcctaaattgatatccgataacacagcacacatcggaaagaacttacc

SEQ ID NO: 36245 - DNA, 260 bp, Unknown
  Description of Unknown: RightRegion for integrase B10246 sequence
aaagatattaactccgaaaatattgttttatttaaaaatattaaaaagttgttggttgcataactacaccccctatattttttcttgcgttttatacaaatcttggagctgcggtcgggagcggtttggagtaaaaatttttatggggggagtgtcggatatgtagcctgtcagaaaagagctttaaatataaaaattccttgttttctattaaaaaacaaggaagaaaaggggttcttatgatgaaaaatacactattt

SEQ ID NO: 36246 - DNA, 260 bp, Unknown
  Description of Unknown: RightRegion for integrase B10247 sequence
gtttacgagagctatttcacagtagagttcaagtctggtgcaagtgtagacatctataaataaggataattaggtttcacctcgcttcggcggggtgttttgttgttgtagatatattgacttagctgttataatgtatctattaaggataattttgtacaccctattgaaaggtcaattctatgataacgaataatattgaagtggatgtaaaagtgaaatgcattgaggcgggaaagacgcaggtgcagctcgctgaa

SEQ ID NO: 36247 - DNA, 260 bp, Unknown
  Description of Unknown: RightRegion for integrase B10248 sequence
aaagaaagttcgaccgagaagcgtttggtccgagtggcgagaatcgaactcacggcctcttgaaccccattgtgcttctctcgaaaacacaatgtacaatccgatactgcctagactcagtatcgttaaatttcaaatatattatatcattctgtttcattggatgtcaagacgtttcattccttttgtggtcaaattgtggtcaaacgaccccgacaaatgacttttctcccccagctaagttacatcgcgcaatttcg

SEQ ID NO: 36248 - DNA, 260 bp, Unknown
  Description of Unknown: RightRegion for integrase B10249 sequence
aattatcatctggatatccacttccgcatcacggcgcaacagtatttgggaaaagcatcgtgagggagtcaatatcatttgcaccataatatgcgctgcttgacgatgatcgctttgcgtcggagccgcatttcgccaacgaggaaaaaacgctcgctctgcctacgggtctccaagctgggcattccactcatatctccttctctcttgcttttcaccgtgcttttcgtcaatgtgcaggcctcattgatgactcggac

SEQ ID NO: 36249 - DNA, 260 bp, Unknown
  Description of Unknown: RightRegion for integrase B10250 sequence
cacgtttattcggatccaaatgcttttgaattggatgtgtatccgctgctgaaaaaggaatgatttttcttttgccctgtgagggtatcttgtaacgttgtacacatacaccgatatatgataccttcgtaaaaaccccgccttttggcggggcctttttatgttgtggacaatgtttacttttcagcaatgtactcatagtacattgctgttttgtttggcacggcgtctctgtcctccatccacgccttggccatcat

SEQ ID NO: 36250 - DNA, 61 bp, Unknown
  Description of Unknown: RightRegion for integrase B10251 sequence
gacgaagagaaagaccggcacgttctgcggcaggtcatatctgcccgtcgccgcggcgatg

SEQ ID NO: 36251 - DNA, 61 bp, Unknown
  Description of Unknown: RightRegion for integrase B10252 sequence
ctgtttgattgtctggtggtcaattctatggatgatgtaagatttatcctgaaggatggca

SEQ ID NO: 36252 - DNA, 149 bp, Unknown
  Description of Unknown: RightRegion for integrase B10253 sequence
actcgaacacaatggacatatggcaggtccgtgttcgttgaatacgttataacaaaaaaatagacctctcagatttggcctttccgggccgttctggaggtctttttctttttgcagttcattgttcatcgtgaaataaaaaagcgctc

SEQ ID NO: 36253 - DNA, 260 bp, Unknown
  Description of Unknown: RightRegion for integrase B10254 sequence
aaggattatgaactggaggtattccctaggataccgaagcaccccgacttaacagaagaataaccgcagtgacgtatgcggctattcatagcacgttttatcactgcggttatctttctacctattacattgattccatctttgcgatgaactttctgtactctgctttggttctctcgtccggggcagactccatcatatctctcagagagtcgagcattgcctcgtccccggagtatcttctagagtatctgcccatc

SEQ ID NO: 36254 - DNA, 260 bp, Unknown
  Description of Unknown: RightRegion for integrase B10255 sequence
cataatccgaacactatttatactaaacattttatagtgttggattatacatttactcaatgagcttaaggcggcttccatttgagagagagttgactcaattaaacctaaaaaagcaaggaattatccttgccttttttagtatccacaatattttagtaaagcttctttctctgctctagtcatattaagcctttgaatataaatcttaacttttgattttccaactgcgtttttgtagccaagatagcccataacca

SEQ ID NO: 36255 - DNA, 260 bp, Unknown
  Description of Unknown: RightRegion for integrase B10256 sequence
gggtatttggtactgttattttcggacagtatcggatactctcgcctttatttttgttgctgatatgattcttcaaattgatttggggtttgctgtttaagacattcatgcggtcggtaatcgttataaaaatcaatatattctgatagactttcctctaattcggagacagtttcataaaaatgaaatttgaactgttcttttttaagcgaagcaaagaaagattccgccacagcattatcaagtggattgcctatatt

SEQ ID NO: 36256 - DNA, 260 bp, Unknown
  Description of Unknown: RightRegion for integrase B10257 sequence
atcgtaagatcaatcgtgaaagagtgtacttgggacggggaaacgctttttattttgctttgaaactcgtttttttataatgcgtggctctgccctcattataaaaatgtgaaattgaaaaagccggaagaaatgaattgcacttttgggtcctgaaaagtgcatctcgttttgtccggggcgtgaaatgaatcctctttctgaaatgaatagaacttttgcaaagaaaaaaggcgggaagctccgaagaactcccgcct

SEQ ID NO: 36257 - DNA, 62 bp, Unknown
  Description of Unknown: RightRegion for integrase B10258 sequence
aaaaaagaatggacaaagaaagaccactttgaaatcgaaatcattccgcggttcccggtata

SEQ ID NO: 36258 - DNA, 61 bp, Unknown; identical to SEQ ID NO: 36251
  Description of Unknown: RightRegion for integrase B10259 sequence

SEQ ID NO: 36259 - DNA, 260 bp, Unknown; identical to SEQ ID NO: 36195
  Description of Unknown: RightRegion for integrase B10260 sequence

SEQ ID NO: 36260 - DNA, 260 bp, Unknown; identical to SEQ ID NO: 36196
  Description of Unknown: RightRegion for integrase B10261 sequence

SEQ ID NO: 36261 - DNA, 260 bp, Unknown
  Description of Unknown: RightRegion for integrase B10262 sequence
aggcgcaagcttccacctgagcagcacgtgaaggttgagtgggtgggcgtgtttgctgagtagggggacgcgaaagccccggtggcgagccggggctttttctatgccctgtgtcgggcgaggcagaccgggatgatgctggggtctgccaggagggtcaccagggggcctaaggcgcctatggggtcgcgtcgggcgtagtcgaggtcgcaggtgcgtccgaacccttggaggagcatggcgagtgcttcgtccgggag

SEQ ID NO: 36262 - DNA, 124 bp, Unknown
  Description of Unknown: RightRegion for integrase B10263 sequence
cgaacggaaattggattcgaattaaaatgcggcattacgctaaaagaaaggctggtgaggtaaatgagtcatacaccattcggctaccggattgaaaatggaaaagccgtaattgataaagagg

SEQ ID NO: 36263 - DNA, 260 bp, Unknown
  Description of Unknown: RightRegion for integrase B10264 sequence
cgtggtcacggacacgaagaagacttttctattaccgtataccctaagcttccaaaagtataaagtttacctctatcttatcggcaccgaagagctcggcttgataagatagaggtaataacaaataaagcctccgggggatatcctcggaggcctttgctttacttcttaacaattattgcctgcagcctgtcgatagacacgccgtaaattccggcataaccgtcgctgtttttgtcgttccagcctgtgacatacgg

SEQ ID NO: 36264 - DNA, 59 bp, Unknown
  Description of Unknown: RightRegion for integrase B10265 sequence
gacaaagactctttcctcacaactctacgggacaacatcgcaaccgtcataaatcgtga

SEQ ID NO: 36265 - DNA, 242 bp, Unknown
  Description of Unknown: RightRegion for integrase B10266 sequence
gttagcactttgctaacggctttttgttttttatatcactttgcaaacattttgcaaacataaaaaataaaagcagataaaaatagataaaataaacgtactggcctctgttatatcgttacccctaatactacataagctgctctattgataatatgaccgtctgttcttactttgtaatggatggcatccataaatatgaaagtgtatatcttttctaatggccttgattgccattcttt

SEQ ID NO: 36266 - DNA, 260 bp, Unknown; identical to SEQ ID NO: 36194
  Description of Unknown: RightRegion for integrase B10267 sequence

SEQ ID NO: 36267 - DNA, 260 bp, Unknown
  Description of Unknown: RightRegion for integrase B10268 sequence
attggtgtactaagcgggtcacatccgaacccgcgagtcctgatctacaccatcgcggtgtaataaaagaacccccggatttctccgggggtcttttcatatccatttttacaatacatagccttcatcattatcaggcggtttcttctcagtttcctcttcctgattctcctgcttcttctgatccacctccggcaatccggtcagggccagaagcatggccgtgatgaagccgaaggctccggcagacagtgccgcca

SEQ ID NO: 36268 - DNA, 260 bp, Unknown
  Description of Unknown: RightRegion for integrase B10269 sequence
aaaatggataaagatttttctattattgttaaagaatatgctttacaaaacgctgatttatagaagtgcgtctttagttgttattctaaaagtaaataataaaaggtatctttacttagataccttttattagaatataattaatttatctcctttaatctattaatatttatatcagttttaattattatgtgtattgcatcatttgttttatgtccactcatgataaaatgttcaaattctagtttctttttctctcc

SEQ ID NO: 36269 - DNA, 260 bp, Unknown
  Description of Unknown: RightRegion for integrase B10270 sequence
ctagggagatggcgcgtcgttgccgtgaaagacggctttggactgtcatcgtgcttcggctgatggaagcgccctccttttccgggagggcgctctttgttgcgccggccacgtgcgagacgttcgggcagaaaggagaaagatccccagccggcgtcaaccgaagctcttgatgattgcgacgaggacgagaagcgcagcccagaacgcgcagaaagcaaggactgcaatctccctgtcgctcaattactgcgccttct

SEQ ID NO: 36270 - DNA, 260 bp, Unknown
  Description of Unknown: RightRegion for integrase B10271 sequence
attggtgtactaagcgggtcacatccgaacccgcgtgtcctgatctacaccatcgcggtgtaataaaagaacccccggatttctccgggggtcttttcatgtccatttttacaaaacatagccttcatcattatcaggcggtttcttctcggtttcctcttcctgattctcctgcttcttctggtccacttcgggaagacccgtcagcgccagcagcatggccgtgatgaaaccgaacccgcccgcggacagagctgctg

SEQ ID NO: 36271 - DNA, 260 bp, Unknown
  Description of Unknown: RightRegion for integrase B10272 sequence
atcatccgatccgtcgtgaaagagtgtacgtgggacggggagaccctttctcttttgctctaatgttcactattttattatgaggggttctgcgtgcatcatgaaattgtgaaattaaagcacagaaattcgggcacagatttttagatacactgtgcctcaagttcgggcacagttatttaagcacagaacgagaaaaagccctccttgcggagggcctttctcggttgtgagggggcacaaccttaagatgaggaata

SEQ ID NO: 36272 - DNA, 260 bp, Unknown
  Description of Unknown: RightRegion for integrase B10273 sequence
gacttgcagagatgcaagtcctttttcgtgtttacagcgtttttctgcaggattcgggtgtaaaaggattcatgtttgtaaacgatgtaaaggttttgaccacttttttgaccacaacgtaaacgaaatcacaggtacttttctatacagttcatggcctcgactttcgtttccattgtggagtgggcgtagagctgtaaagtcagggaaaccttggtgtgtccgaggatttcggacaatgtgcgcaagtccatacccga

SEQ ID NO: 36273 - DNA, 260 bp, Unknown
  Description of Unknown: RightRegion for integrase B10274 sequence
acccgcgcagacaatcctgccgagcatatgacactggatgtctatccggcatatccttcctgatttattagggatagcatggaaagaagaatgaattcttctttccatgctatccctatttttccgtagaacgcgaaaaggccggggcttttgccccggctgtcttacttcttgggaatcatttccatgtacttccgcagtttgtgcggaccggcgtccttgtctttgaggaaatcgcgggcgaggtggccgtagtattc

SEQ ID NO: 36274 - DNA, 59 bp, Unknown
  Description of Unknown: RightRegion for integrase B10275 sequence
ccggatgctaaaatgttcgttttgactcctgatagctccaccagaaccaaagcactaca

SEQ ID NO: 36275 - DNA, 260 bp, Unknown
  Description of Unknown: RightRegion for integrase B10276 sequence
atgttaagaaaattactaaaagagtgttggtttgacggtgaaaatttgcatattaagatatagaaaaatactccccacaccattatgataccatctagtcacataataatatggggagtttacattttaacaagaggcgaatataatataattagcttacataccatgtgtatgtgtagttccttaagacgttactatttaaagtagcgtcttttgctttttaaatcctaataacatacttactatttagagatatccaa

SEQ ID NO: 36276 - DNA, 260 bp, Unknown
  Description of Unknown: RightRegion for integrase B10277 sequence
gataaccccaccgactacatgtccatcgatatttatcctgccattccctctgaaaataggtagcgcatcatatttataattcatttttcatgtgatgatatacccattccaaaatgttcacagccggggctttcgccccggctgtgttttagccctttggaatcatctccatgtacttgcgcagtttgtgcttgcctgcgtccttgtccttcaggaatgcctttgccatgcaggcgtagtattcgggtttatcgacgttg

SEQ ID NO: 36277 - DNA, 260 bp, Unknown
  Description of Unknown: RightRegion for integrase B10278 sequence
atgttaagaaaactactaaaagagtgttggttcgatggtgagaacctgcacattaagatatagtaataaaatactccccacaccattatgatactatctagtcacataacaatgtggggagtttacattttaaatcctagtaacatacttactgtttaaagatatccaaccagcaccacttttaagtttgccccaagtaataccatcagcaccagcaacatccacaatagtaaaagcctcacctttttttactacttggt

SEQ ID NO: 36278 - DNA, 61 bp, Unknown
  Description of Unknown: RightRegion for integrase B10279 sequence
gccgatgccgccgtctgccgcggctcctttcatgccgttttgggcggggaagccggtgagg

SEQ ID NO: 36279 - DNA, 260 bp, Unknown
  Description of Unknown: RightRegion for integrase B10280 sequence
cgctcacggcacgaggcagtattccatctcaaatgcgggctcacgctcacggaaaggatgtgaaaatcatgggacacacaccatacggatacagaaccgaaaacggcaaagcggtcatcgacgaagagaaagcccagcagataagaaacctctacaggaactaccttgacggaatggcgcttgccagggctgcgcacgaagcaggaatcgagacgtggcacggctcggcaaaacgcctgctcgaaaacaagcactacctc

SEQ ID NO: 36280 - DNA, 62 bp, Unknown
  Description of Unknown: RightRegion for integrase B10281 sequence
cgagaaattgcaataaaaaacacattcgatgtgttcgaatgtgttttaaatggtggaggtta

SEQ ID NO: 36281 - DNA, 260 bp, Unknown
  Description of Unknown: RightRegion for integrase B10282 sequence
ctgaacgaacatctggcggtgcctgatagaaggtctgtcctggtggctgttcttctaaattaaaaaaggtccgggacctctcctggatcttttttgtcttaagactgacttaataagacctttttattgttgcactttgtagcacaaaaaaacacctcgaatgaggtgctttttcgagccacatcgaatgtgacctttctgtctgaagtcagtataacaaaaaacggtcccacggttatcccgtgagacccaacaaaaaa

SEQ ID NO: 36282 - DNA, 260 bp, Unknown
  Description of Unknown: RightRegion for integrase B10283 sequence
ggtggaggcgaaccatacctaactatatcactgtccattgaaagaagtgaattatataaatagcttggcctgtcactacccccagatttcatgaattgccctgtgaagtatcttctttttgtactgcaaactagagttactattaatgtataaaacttacccaagtggccataattattattattgtgtgaaacccatattttttagtttttttcattttttacctttatagccaggcatggattccctggctttttttt

SEQ ID NO: 36283 - DNA, 260 bp, Unknown; identical to SEQ ID NO: 36226
  Description of Unknown: RightRegion for integrase B10284 sequence

SEQ ID NO: 36284 - DNA, 260 bp, Unknown; identical to SEQ ID NO: 35683
  Description of Unknown: RightRegion for integrase B10285 sequence

SEQ ID NO: 36285 - DNA, 260 bp, Unknown
  Description of Unknown: RightRegion for integrase B10286 sequence
gtgaaatccgaacctgggcttgtgtttgtacacgggctaatcggattggtcatcggaagatgacgggaaaatggccggcggctggacaccggctcttttttcgtggaaaatagaaaaggctccccgcggcgagcggggagcgcgttttttattcggcctgttcgggcgggtgttcttgtgggacttccggcaggcccgccaggctggtcagcagggagaggacgcccgccatggcggcgacggagagcgtgccaagccaa

SEQ ID NO: 36286 - DNA, 260 bp, Unknown
  Description of Unknown: RightRegion for integrase B10287 sequence
ctatcaagggaaaagatcgcctttgaactaaaatgcggactcacactaacagaaaggatgtgaagaaatgggacacaccccttacggataccggatcgaaaatgggatcgcggtcatcgacaatgatgctgcggacagactccgtaacctatacaagaactaccttgcaggcatggggctcatgtcagctgcggcagaggtcggaattgacgcctatcacggcagtgtcaagcgactcctgagtaataaacactatctcg

SEQ ID NO: 36287 - DNA, 260 bp, Unknown; identical to SEQ ID NO: 36222
  Description of Unknown: RightRegion for integrase B10288 sequence

SEQ ID NO: 36288 - DNA, 260 bp, Unknown; identical to SEQ ID NO: 36193
  Description of Unknown: RightRegion for integrase B10289 sequence

SEQ ID NO: 36289 - DNA, 260 bp, Unknown
  Description of Unknown: RightRegion for integrase B10290 sequence
tctggtgtaccaaccgtgttacatccgaacacgcaggtcacaatcttccgggttgcgatctgagccggatgaaaaaaggccaccgtcaggtggctttttctttttccttttccatgtcctcccggatcagccgctttatgtacccctgtatgttttcctgctcctctatccattccagcagctccggctccgtcttccggttgatcttcagccggatctgccggatgttttctttttcatactggttcaaatattccatg

SEQ ID NO: 36290 - DNA, 260 bp, Unknown
  Description of Unknown: RightRegion for integrase B10291 sequence
ttcgagtcgctggagttcttctttgggatggccaaggtcgtccagatcgaggtggctgcatgatcgaccaccgcgatacgcacgtcgttcgcatcccgatcgatcagatcacggtcatgaacccgcgcgaacgtggtaaggtcaagttcaagcagatcgtcacgaacatctcgcacatcgggctgaagaagccgatcaccgtggtccagcgcggctcgcgcgacggtaagccgctgtacgagctggtctgcgggcagggg

SEQ ID NO: 36291 - DNA, 260 bp, Unknown
  Description of Unknown: RightRegion for integrase B10292 sequence
gaccgactcagccgcatcctgccggggtggctagagagcatcacggcacaacgggcagcctgacagcccgcacacagaccaacggcgcgcttccccggacgagggtggggagacgcgccgttggtgtctgtgcggacctctcagcgggctacagccaccacgggaccatccccggtagcccacgcggtcccgttccagtgccggtgaatgccatcaccggtgatcacgtgctgtcccacggtccagagcgtggcgggact

SEQ ID NO: 36292 - DNA, 260 bp, Unknown
  Description of Unknown: RightRegion for integrase B10293 sequence
aaagcacataatccgaacctttatataacgaagaagttcgttgccttggttatcggattataaagacaaaaagacgaggattattccccgtcttttttctttttgattttatcgtatatcttcctaaccgccgccgtcaatgctatgcaaagcggaatgaatggagtgaacggcgcaagccaaaacgcccaacacgccgagccgaccgcccaccaccattctatcccggtgataatcgctatgaagtatggaatccacac

SEQ ID NO: 36293 - DNA, 260 bp, Unknown
  Description of Unknown: RightRegion for integrase B10294 sequence
ggagatgacatcctggtgcgcttcgggaggacaagaggtgaggccacgtcgcgtctgtgctgactaggctggctggtggagcggatgagtctatgaggggtggactcatccgctccttcatgtctgggtggcctcggaaaccctccccagatccacggagagcgcacagaatggcttgtgggtagttggggaagggtccggtgggttgtgtgcgtggagacagggagactggacgctggcgacatgatcaggatcaggga

SEQ ID NO: 36294 - DNA, 260 bp, Unknown
  Description of Unknown: RightRegion for integrase B10295 sequence
tgtaggctgcttttgcaatcacattcgaacaccatcgtcattttgtacgacgtccggttgtgaaaaggaaggtgcaattcctgcaccttcctctttatttatacatcgcctgtatcgttttagcctccgccgctttctcgatctgcttctcatgaagatattcatataccgccatcattttttccggtggttctccgttttcgcttctgtattttgcgatcatcgccaccacgccgtcatgcagcatccgcatatgttcc

SEQ ID NO: 36295 - DNA, 260 bp, Unknown
  Description of Unknown: RightRegion for integrase B10296 sequence
ataacacacagcatgcgaacctctgtatacaaaacggttttcttgattaaagtgaaaatatgacggcaaaaacggagaggcggtgtttttgttgcgccacctctccaattagtcattccacaatagaagaaactttcaatgtaatatatcctctttctaatagttttgccatgtctgtacttgccgggagctccaattgaagcaaatccccgctcgtgtcgttcaaacgtataagaagagtcccatcgtacatgtcgtta

SEQ ID NO: 36296 - DNA, 260 bp, Unknown
  Description of Unknown: RightRegion for integrase B10297 sequence
gtacaatatccgaactctgcaacagccgtgtaccgtatagaattgcacaaaaaaagagcctgaggccgaaacctcaggcttatcactcactaaacatcaggcggcttcttttccttgttatactgagcagtgctgatacccagcagcgcacccagcagcgtacacaccgcggccgcggtcttcgcgatctcatcagcatagggccagccccaaatcccagacagggcaacataggccgtagccagagcggggatcaccac

SEQ ID NO: 36297 - DNA, 260 bp, Unknown
  Description of Unknown: RightRegion for integrase B10298 sequence
cgcggaaaatacggcccgagagagggcgaaggcatcaagctcgaggtgttcttgaggctgtaaaatttttttacggcttcaatacatcatagggtcgcacattcgtctggcgtgtattgttgtattgaatatttaagagaagaggacagagcccgagagccctgtcctttttgagtttcttacttcttcggcgcggtgtaggtcatcgcctggtcgctgtcggacacgcccgccgtggtcgggtcggtcacgatgccgag

SEQ ID NO: 36298 - DNA, 260 bp, Unknown
  Description of Unknown: RightRegion for integrase B10299 sequence
ccgaacaccttctttataggagtcgtgtttggacaaacaagaaaacaccgtgtagagccataagactccgcacggtgttcttgttttagatgtgggtgagaagtgttgcaagctcctcacccactaaggaggaaatatatgctcaatcggttgcaagccgagcagagccaaattaggaatttttcagttcgtgaacagcagactcaatcaggttgttaatgctttcggtgtcgatagtatagcctttgctgttcagatac

SEQ ID NO: 36299 - DNA, 245 bp, Unknown
  Description of Unknown: RightRegion for integrase B10300 sequence
aacctctcaatcctaaatgagtataacatatttgtgctgattgtcaattctccggctgcttaggatcctctgtgggctcctctgcggccttttctttttcagaggtataaatatacccctcaaggccgttttcttttaatttggccaaattctcatcagctgctgccttgtcaaaaggtcctgcattcacaaccaggtaatcaccctctgtgatattaaccttagcgcaatgctctgctgcctca

SEQ ID NO: 36300 - DNA, 260 bp, Unknown
  Description of Unknown: RightRegion for integrase B10301 sequence
gtatccgaaaccgtctttttctatggactggctttgtgtcagcttctcaatttgaaaaagtaaggcggaactgtgaaacaaaaaaacaccgaggattttgtccctcggtgtttttgttatgcgtaaaattctttgagtgcgtatgcgatttgctttccgaagagggcgacctcgatgtcgcacattccgggtgttgcgtaaacgcacaaatttgacctttttagcggtcttttcttttggactacctcgtacattccgaa

SEQ ID NO: 36301 - DNA, 260 bp, Unknown
  Description of Unknown: RightRegion for integrase B10302 sequence
gttaaatccgaaccggggcttgtgatcgttcacgggctaatcggattggtcatcggaagatgacaatgaaaaaggccccgccgttgtggcggggccttttgtgttacatttcttcaggagggtggtttttcgtctggatcaattcgatggccagggtcttcacggcggagagtccggcgcaggcagcgctcaacaggacggacgtccaggcggcgctggtgaatgtgtccacggagatggtagccgggagggcgacaagg

SEQ ID NO: 36302 - DNA, 260 bp, Unknown
  Description of Unknown: RightRegion for integrase B10303 sequence
aatgctccaccagtcgtgtcacatccgaacacccggattgtgatctataccgttgcggtataggaaaaagcccgccggaaatccggcgggctcgttctatcgttacgccccgttccgcctactgtatcccccgcgcggcgcgcaaggattcagcggaacagggctttactcgttgaatatttctttttctgcgtgtttcttcttatcgtccagctttgcaaaggtcagttcgtacgaccccatggccgcgagcgccacaa

SEQ ID NO: 36303 - DNA, 260 bp, Unknown
  Description of Unknown: RightRegion for integrase B10304 sequence
aacctctcaatcctaaatgagtataacatatttgtgctgattgtcaattctccggctgcttaggatcctctgtgggctcctctgcggccttttctttttcagaggtataaatatatccctcgaggccgttttcttttaatttggccaaattctcatcagctgccgccttgtcaaaaggtcctgcattcacaaccaggtaatcaccctcagtgatattaaccttagcgcaatgctctgctgcctcatcctttctcttggca

SEQ ID NO: 36304 - DNA, 98 bp, Unknown
  Description of Unknown: RightRegion for integrase B10305 sequence
accaccacgtcagggcaaggctgttttgtccaccgttgctactgcaacggcttgacctattagcctgcccttcctttattccaaaaatcttttgtttt

SEQ ID NO: 36305 - DNA, 260 bp, Unknown
  Description of Unknown: RightRegion for integrase B10306 sequence
cgttgtaccgtcaaggatttacctattaccctggcttggctaactggttctgaggtcgtttaaattgatttgatgtttaaaaaggtaaatcatcgtcggctggcttattgtaattgtagtgcaaatcccttaactcttcccagctcagtgttgggaatttgttttggttgactgtaaccttaaactgaattaaaccacttttgattttagtcaacatatcatcagtttgatattgtaaatgtactggtttttcattcttt

SEQ ID NO: 36306 - DNA, 260 bp, Unknown
  Description of Unknown: RightRegion for integrase B10307 sequence
ttaccaaactccccgtcggttcgtacaacgggaggtttggctccccgaacgcaaccctcttagaacacacatcctggccgtgttatggcaggagattttgtccaaagggtgcttgtgcgcttcattgttgggctctacttgttaacaccggcttgatcgagataatctcctgcatcctgagcaatgaagatcacgttcggcaggtaatcctgcaggagggggcggtgaccagaaaccccttggccaacacggcctacgag

SEQ ID NO: 36307 - DNA, 260 bp, Unknown
  Description of Unknown: RightRegion for integrase B10308 sequence
atcgcacgcagtgtgctgcgcaaatgtgtgtgggacggggatactctttttttagagttttgatttatgtatttttgtgactgttgggactgcaatagaatcaaaaagatgcaaaaaaacatttgaaaaggtattgacacgccactcattgagtgttataattaagatacattaaaggaagggaggtggtgatgtgaatgatcccatagaaataataaaagacctgctcgagatcatcgttcttctcgaaacgcttcgaa

SEQ ID NO: 36308 - DNA, 260 bp, Unknown
  Description of Unknown: RightRegion for integrase B10309 sequence
tccggtgtactaatcgttacacatccgaaccagatcctcttctggtatatctcgcggatgtaaaaagatggtgcagaaatgcaccatttttttatttatacattgcctggatgtttttcgcttccgctgccttttcgatctgcttttcatgcagataattgtaaatcgtcatcatcttttccggcggatttccggtttcattccggtatttgataatgatatttgcaactccttcatgcagcatccgcatgtgttccatt

SEQ ID NO: 36309 - DNA, 260 bp, Unknown; identical to SEQ ID NO: 35782
  Description of Unknown: RightRegion for integrase B10310 sequence

SEQ ID NO: 36310 - DNA, 260 bp, Unknown
  Description of Unknown: RightRegion for integrase B10311 sequence
tctggtgtaccaattgtaacacatccgaacacccgcgtcacggtgtacctggtcgcggtgtagcggaaaaagaaaaatgacccccggattcgttccgggggtcgttgtattttacgctttttgtttaagacgcacaccctgccgttgatggatgtgcgtcactcttggggcggttggtctttattgtactgcgcggtggaaatacccaggagtgcacccagcagcgtacacaccaccgcggaagtcttcgcgatggagtc

SEQ ID NO: 36311 - DNA, 260 bp, Unknown
  Description of Unknown: RightRegion for integrase B10312 sequence
gaaatcaaagtctccactaactggttttgcataataacactgtttagctcgaaaaaaagttagcaaaattcaatatgagcttgccttattatggggtataccctataataatagacgtaagaaagaaaggaggtggttcaaatggatgacaaaatatgggacttaacgattgctgtcataagcgtgctactggcaaaggcgctggatgaaggaatcgaagccctaaagaaaaagacctctcgtaagcccggaaagcacac

SEQ ID NO: 36312 - DNA, 260 bp, Unknown
  Description of Unknown: RightRegion for integrase B10313 sequence
gatgtcattgactttggacaggccaagggtggacaggccgtgctagatgtgtatctgaagtaagggcaattaattttgcccttggttagtatcatgaacattcgattttaatctactattcatcatactaatgatgctccaaccattaccgcaccgccattatagcctatacggacacaaaaaggaagactgaattgtcttccttttttgtatattgacttccatatttttgggatttataatattttcagaattttgaa

SEQ ID NO: 36313 - DNA, 260 bp, Unknown
  Description of Unknown: RightRegion for integrase B10314 sequence
ttaaagaaagctttaagtcaagagtttatttcaagtctaaaagctttagatcttgcagcataaaaaaacacccacccttattcagagtgagtgccaaaaaagaaatagcaaaagaagtcaggacaattagcaaggctttacgaaaagttctttttctgctgctctacgccttacaagcccttgaaggacttttttatttgcgtaaacccagcgcccgaattgtgcggctgcttcactgtactttttttgatttaataatt

SEQ ID NO: 36314 - DNA, 260 bp, Unknown
  Description of Unknown: RightRegion for integrase B10315 sequence
gattattatttagaaagagatgaaataggagatgtgaatttttatgttagcaccaaatgttaaaataatagaaccgacaaaaaaggtcgacaaaacttataacggaatgatgcaagacctacctaaaagagtgtgtggttattgtagagtatcaacaaactcggaagagcaaaagacaagttatgaatcacaaaagatttattatgaaaacctaatacgaggccgacaaaattggatattcgctggaatttatgcagatg

SEQ ID NO: 36315 - DNA, 260 bp, Unknown
  Description of Unknown: RightRegion for integrase B10316 sequence
aggttatgtagtcaaactcgaacacttccggtccttttagtcacactttcactcgctgcataaataataaccgcaggtttttacgcctgcggtttcgcacttaattatcttaagtattcctctatagccgctctgatcacttgtgcctgtgatactccttctttactgcacttctctttgaatctattcacaagatccttgggaagcttaaccaatatagtcccatacactttctctgcatatcggttttttactgccgc

SEQ ID NO: 36316 - DNA, 260 bp, Unknown
  Description of Unknown: RightRegion for integrase B10317 sequence
aaatcacacacaagatttattagaaaaaggtacaacgcaaagggggttagccaaaacggttaacccctttttcataaaaaagataataaaaaaaataataactataatataataatatggctctaatttttcatttcgttatgtaattgatgatggtgaaattcacaaagtgccattaaattgtttgggttataccccaattctttcatttgtaattctgattcagctttacttattggtgttatgtggtgcacctctgt

SEQ ID NO: 36317 - DNA, 260 bp, Unknown
  Description of Unknown: RightRegion for integrase B10318 sequence
gaaatcgtagtcatgttaagaaagaatttaaatcttattaatcagtctcttctattttcttaaaatagtcatttttaattaataaccacattttttcatcaggaacatttaagcatttttgaactttcttccaaaacttaacagtgccatttctcttgccattttcaatatttgatatatatatagctgtagtttcagtcgcttccgctaattgcttttgcgtgcaattcattagatttctgaagaattctagataacag

SEQ ID NO: 36318 - DNA, 260 bp, Unknown
  Description of Unknown: RightRegion for integrase B10319 sequence
gggcgagtgaagaaaacctcgcctgcgaaaaacaggaagcggggaaaagcacgtacaaggtaatccgccaattttgtgaatcacgattgaaacccagcccgccacgagccagagtcccaatatgcgctacctgctcgcaattgtgttgcctccggtcgcggtgctgctttgcgggaagccgtttcaggcgatgctgaacctgattctcacgctgttcctttggatccccggcgtggtgcatgccctgttcgtggtcaata

SEQ ID NO: 36319 - DNA, 260 bp, Unknown
  Description of Unknown: RightRegion for integrase B10320 sequence
atcagggctaaattgaccgattttttcccaccaccagtcgaactatctgagcagagcggctgaacgagcgttgtgcgcctgaagcaagccttccagttcgctgaccatatccagggccttctcacgttcgaatccaccgcctccgatctcaccacggccactgcctttgcacggctggcagatcatgcggtgggtggtgccggtgccatggcaagcgtcgcattttccatcgagccagtaggccagcgagcgctcggcaa

SEQ ID NO: 36320 - DNA, 260 bp, Unknown
  Description of Unknown: RightRegion for integrase B10321 sequence
gcgatcgcgatcagaggctctgacctagagagcaacctcgacctcatcaggagagttagctagacgcgagatggtctagcagcggtatgaaagtattgagtgactcccgcaggatatgaatccttcccccaatccggattgccccgagcttgtaacgaagctcggggcattttttgttatgtatcccagttgtacaccagttacgaacggtgtcatcacacacgaagatgttgtgagctgctagttcagcaaccacctct

SEQ ID NO: 36321 - DNA, 260 bp, Unknown
  Description of Unknown: RightRegion for integrase B10322 sequence
agtctggcttcccagtgtgtgtccgctgatgcagcggtagaattgatggaagtgttgaaataatcacagtgacccctccatcacccccttaatcaaaggtatccatacctccagagatttcttcataacgtagatccttccaccaatcctaatagcctcaagccggtaacgcagcttggggctttttttattggcgagcccccgcgtacaccagttgcgaacagtgtcggggcatacgtgaatgtcatgcttcgccagca

SEQ ID NO: 36322 - DNA, 260 bp, Unknown
  Description of Unknown: RightRegion for integrase B10323 sequence
gacaatgtacgaaccaccctgatcttccgcaactatgggatcattgttgtggtaccgtactaaaagaataggctccgtgcttaacaggcacggggccttttctttttgccctcgcgcccctccctttcctgtaataatcttccgttgtgtcgtatttatcttccaaattcgacacgaaatcccaaaaaagcggtagattattccgcagaaggagcgtacagaaaatgatacggattcatttgtccagacttctcggcgaa

SEQ ID NO: 36323 - DNA, 260 bp, Unknown
  Description of Unknown: RightRegion for integrase B10324 sequence
ggacgttggagtggcaaaatagatagtttcacactaatactatatcctaatctacctaattaattttttatgcttatcactgataacattatggtgcataagaataggtaccaatatgttatcagtgacacatttaaccgatttatatcaacttattatgttgttttatatttattaatctatctcatggtactatctcatacaatcaaaaagagcaggaatccacttcctactctaatagttttatcagttccaatcct

SEQ ID NO: 36324 - DNA, 260 bp, Unknown
  Description of Unknown: RightRegion for integrase B10325 sequence
gagaagaatcaaacaggtgatgatttcacaatcgagatcacacctaagttcccgggagagtagttatcattctatggtttgcaaattgaccatagaatgatatccattaagtgattgcgctatgaatggtgtatataatataatttagtcagatgcggtggcggaataggtagacgcacgcttcagctacaacggacgtatgcgcgtcagataacacgtgcttgtagtgctcgtgatacgtcatgcaaggtgcaaatcct

SEQ ID NO: 36325 - DNA, 260 bp, Unknown
  Description of Unknown: RightRegion for integrase B10326 sequence
gatgtgcacctggctcaggccggtgagcctgcggcgtccgagggcgaggaggtggcggcgtgagcgcgagttccgagtctcggcctgcggaggccggcctcgtcagcgcgcagttccaccgcgtgcgtcgggcgacggtgcgcttccgggagggggcgagccccccgccgcgagaggcggcgcgccggccagcgcacgtcgcgcgaatgctggccctggcgcaccatgtggaatccgtcattgagcggggactggtggcg

SEQ ID NO: 36326 - DNA, 260 bp, Unknown
  Description of Unknown: RightRegion for integrase B10327 sequence
gagaagaatcaaacaggtgatgatttcacaatcgagatcacacctaagttcccgggagagtagttatcattctatggtttgcaaattgaccatgtattgataactacttttttatttacgattaccacaaccaccacaagaaagcccctgcttatgcaggggctttctacttaattttctacttacatattacttatgcaatcgtcttccctttctgagtcggaagcatgagttcatactgttcggcaagctgatatagg

SEQ ID NO: 36327 - DNA, 260 bp, Unknown
  Description of Unknown: RightRegion for integrase B10328 sequence
ctgctactggcaaccgacccggccgtgttacctgtaaaacctcagtggatcgcgttggattgagactcgctttcgcacgcgaacgagtctcaatcagccatctcctatccgtcagattctcctgatccgctgttcactcctcttagctcttcgctcaagatgtccacggcctgttcctctttcgccatctcatcctctatctgcttgagtaccccgtccaagttccccaacttcttgttgacgcggtggcgcaagccgag

SEQ ID NO: 36328 - DNA, 260 bp, Unknown
  Description of Unknown: RightRegion for integrase B10329 sequence
ttccacccgacgggcatccggtcgctcgccgacgagatgaaacggaaggaggccatcgcatgagcaagggaatcaccatcaccaaggaagtgcattttcgtcatgggcgcggcagacggaaggtgctcgcggagggcgcgccgcctgaaatgacatccctgcagcccggaagcgtgccgcgtttggcgcgacttatggcgctggcgattcggatggatcgcctcgtcaagagcggagaggtgacggactacgccgacctc

SEQ ID NO: 36329 - DNA, 260 bp, Unknown
  Description of Unknown: RightRegion for integrase B10330 sequence
attggagagtggtttcaggagctcgaggcggtgctgccgctcctcggtgagcagcgggcgtgagcgagatcgtgctctcccccgccgccgcccggaaggcggttcgttcgtctcagcgcagccggctggaagatctgctcgtcgcccgaattgcccaggctggccttctcgcccccgaacgtgagctccgctttgctccgcctcgccaatggcgattcgacctggcctggccggacctgcgcctcgcgctcgaggtcgac

SEQ ID NO: 36330 - DNA, 260 bp, Unknown
  Description of Unknown: RightRegion for integrase B10331 sequence
tccggtctgccaaccgtgacacgtccgaacccgcggatcacgatctaccggatcgcggtgtgaacggacaaaaagagaaggcgcttttcagcgccttccttttttatcccgccatgcgatccatcagctttttgatgtccatccgcgtcgcttcatccggcgcctcgtccatcatcatccgcaggtgctcgttccagtccactccgcgactgtatccgttccggctgtagcggctttcgttccggccttcccggccatag

SEQ ID NO: 36331 - DNA, 260 bp, Unknown
  Description of Unknown: RightRegion for integrase B10332 sequence
tcagctctgccaactgtgtcacgtccgaacccgcggataacaatctaccggatcgcagtgtgaacgcataaaaagagaaggtgcgaaatgcaccttccttttttagtttgccatgcgatccatcagctttttgatgtccatccgcgtcgcttcatccggcgcttcgtccatcatcttccgcagctgttcgttccagtccatcccgcggctgtaacccatgttgcggttctcccggccgtagcggctgtcgttcctggcgt

SEQ ID NO: 36332 - DNA, 260 bp, Unknown
  Description of Unknown: RightRegion for integrase B10333 sequence
ctgatgaagaagctactaaaaacctgcacatgggatggtgcgaaggttacacttattgtgtaaaactgttgcactttgccagcaaagagcatcaattatacacgggaggtttggacatgaatacaaagggtgggaaggcgatctacgcgatcgcatgctttttcaaattactggcaaaggccatgttctggcttgccaacgaatatgactaccagatgccaaggcttggacgccgggcaaaatggttggcggaagacatc

SEQ ID NO: 36333 - DNA, 260 bp, Unknown
  Description of Unknown: RightRegion for integrase B10334 sequence
gcggcggaaattcggcgttatcaagcggccaattgggattttaataccctgttggcagcataattatggattaaataatctgttctggcggttgccggtgtcaatatgcaaccatgatatattgttttcaaagtttaatccgtcaaatgccggcagcaacatcaactgttcgcggacacgattgtatgctttaaccttggcggctttatcaccggcacattccaattcaattgaccgtatatgcaaatccaacgcacgcc

SEQ ID NO: 36334 - DNA, 260 bp, Unknown
  Description of Unknown: RightRegion for integrase B10335 sequence
tgcggtagtaagtccttcccgatactgcccacaacaacaggaagaactggatggcggagttgacgacggcgttgccgacgtcccccacgccgtagatgagtttggtcgtgcccttgagtttgtggtccctctctgccacggggctgcctccttgtcaatgcgcgtgggtgctcccggcggaccacagtccgccgtgctgcgaagccgctggactgttgtccagcgggagcagccctctcacatgctcccggcggacaaca

SEQ ID NO: 36335 - DNA, 127 bp, Unknown
  Description of Unknown: RightRegion for integrase B10336 sequence
aacagttgttcgactgggaatcatctggtccgagtggcgagaatcgaactcacggcctcttgaaccccattgtgcttctctcaaaaacgcaatggacactccgataccacttgtacgcagtatcatc

SEQ ID NO: 36336 - DNA, 260 bp, Unknown
  Description of Unknown: RightRegion for integrase B10337 sequence
gaggcgacccatcaccagtcgttcccctgtccaaccctcacattttccatcaatcgcagctgacatcaccaattataccacatccaccagaaaaccccaagccctcgcttggggtttttcctatctcatgtacatctcctgcataaccttgacctctgcagtctcgtccgcaatccacgcttttttgtcgtgtaccatggtcttcatcgcgcccattagttcgccgcctccgctggcctgttccagctccgcgcagaagc

SEQ ID NO: 36337 - DNA, 260 bp, Unknown
  Description of Unknown: RightRegion for integrase B10338 sequence
actcgcaacgaaaaccccgcagagtatatgtctttggacatataccccgcaatgcctgaatgaaattaggtggtgcatgcgattaagaattcattctttctctcatgcactacctaattgttggctttattgcgttataaatgcctgtgccggggctttcgccccggctttgcttacttcttggggattacctccatgtacttctggagcttgtgcggacctgcgtccttatcgcagaggaacgcttttgccatgtaggc

SEQ ID NO: 36338 - DNA, 181 bp, Unknown
  Description of Unknown: RightRegion for integrase B10339 sequence
aataagactggcattgtcgatatttattttaagtcagattttatttttgatacaagaaaataaataattaaataatgtcgtattttgtcgaatattgtagttgttatcattgttttataattttgtattaatagttttcacctttcgatattcatcccaatgatcatcggcgagatccgac

SEQ ID NO: 36339 - DNA, 260 bp, Unknown
  Description of Unknown: RightRegion for integrase B10340 sequence
gtcaggatcagtccggcaggtgtcgagccgaggtgtaacttcgttcccgtctgggctaactgacgtcttttacgcgtaacgtcgttggttattacgtgtaaaagacgctagaaatcccgttcgatccgacacgggcgccggtcactgaccgtcctggaagtgctcgtcgaagatccgcaggagatcgccgaggcggtcgcggaggcggtcggcggtcaggcgcgcttctgcggcagtgaggctgtcgatgtcggtgccgg

SEQ ID NO: 36340 - DNA, 260 bp, Unknown
  Description of Unknown: RightRegion for integrase B10341 sequence
aacagttgttcgactgggaatcatctggtccgagtggcgagaatcgaactcacggcctcttgaaccccattgtgcttctatcgagaacacaatgtacgatccgatactgtctagacccagcatcgttaaatttcaaatgcattataccattctgtttcattggatgtcaagaagtttcattccttttgtggtcaaattgtggtcaaacgaccctgacaaatgacctttctcccccggttaagttacatcgcgcaatttcg

SEQ ID NO: 36341 - DNA, 260 bp, Unknown
  Description of Unknown: RightRegion for integrase B10342 sequence
gtggagttcttcttcacagaccatgttttcgggtttgtacttacagtagagagaatagagtaatctattctctttttatttgtgcaatagcctgtataactttgtcatatcccacagtagccgtaaggaatgataggaacgcgagtacgataatctccacgatcacctttgcagtgacgatctcgcccgcaaaaataatgtagcatacgcaagcggcgaccgtaaagaccaccgatacgattgcggcgaggaggttagga

SEQ ID NO: 36342 - DNA, 260 bp, Unknown
  Description of Unknown: RightRegion for integrase B10343 sequence
actgtcctgctgatcagccggttgtgctttggactgattctccactacaaaacgccagcgtgatgctggcgtttttgctgtctcgcaattattccgcggtgtccgtgccttcgggcgggtgggcttcatcctggatgaagtatttgtcgctgctttcgcgtgccgcgtcgatcatgccctcaccgaagatgtaggcaatgagtgacccggcagacatgatgagtgcgccgatctgtgcggcctgctgttccgtctggccg

SEQ ID NO: 36343 - DNA, 260 bp, Unknown
  Description of Unknown: RightRegion for integrase B10344 sequence
aggccaaaaaatgctgccccgcttttcagtgagacagcttcttttgttatatacaagttataaatccggaaatatattcaaagggaaaaatgacgtaaattattaacccgaggttgttttttcttcttgctttttccttaatgttgtgatataatgatgtaagatgcttggtgcgaagcctaatattctttctgcggttgaataatccgcttactaacggtaaaaatagtataggaaaaattttaccgaagcggaggctg

SEQ ID NO: 36344 - DNA, 260 bp, Unknown
  Description of Unknown: RightRegion for integrase B10345 sequence
ggcaaaccgtttgtgtatggaaaatattatatacttattgtcccatttagtcacgcggcataaaaaaaagcggcgggtcagccctcgggagccttgccgccgctaaaacgtcggcgcggttgcgtcggcgttttcttcatgtcattcgagcgtattattgagcgcttgggcgatgaccgtcgcgccgatccacgagacaacgccgagaccggcagcgatcgccgaggctataatgaccgcgctcatctctttaacagacg

SEQ ID NO: 36345 - DNA, 260 bp, Unknown
  Description of Unknown: RightRegion for integrase B10346 sequence
gtggagttcttcttcacagaccatgttttcgggtttgtactaacggtagagaggatagagtgatctatcctctttttatttgtgcaatagcctgtataactttgtcatatcccacagtagccgtaaggaatgataggaacgcgagtacgataatctccacgaccacctttgcggtgacgatctcgcccgcaaaaataatgtagcatacgcaagcggcgaccgtaaagaccaccgatacgattgcggcgaggaggttaggt

SEQ ID NO: 36346 - DNA, 260 bp, Unknown
  Description of Unknown: RightRegion for integrase B10347 sequence
cattatgaaaaactgcggaatttggcggcaaattggaattgggcgttgccaatggcggcatagtttgtctatacagaccattttgctgatgtcagcaaaatgatatttcgaattttgggtgggtttgggtgttttccgaaataatcggaaatctggattatttccattttggaaatggttgcgggtgtgatataatatatttaaccattctctgaatcccccgccgtggtggcggggtttcattttaattatattttttg

SEQ ID NO: 36347 - DNA, 260 bp, Unknown
  Description of Unknown: RightRegion for integrase B10348 sequence
ctaagaaaacaggattggaaacagaaagaccaatttaaaattcaactctttccaaaaatatagaaggcagcggatcagcagccttctaatttgattttgctggttccttattcgtaaagaacgtagtaagtgccctaaatatctctgttttttttgtgataatatcatatctgaagcgttcatccttgatttgagaatacacactcattagtgtagatggtctacggttatactgattgaactgtttaccatatacacat

SEQ ID NO: 36348 - DNA, 260 bp, Unknown; identical to SEQ ID NO: 36246
  Description of Unknown: RightRegion for integrase B10349 sequence

SEQ ID NO: 36349 - DNA, 260 bp, Unknown
  Description of Unknown: RightRegion for integrase B10350 sequence
aaggcgaaccttttccaattcttaaatcacagatatccacttcgactgatcatacctttataacacggaagagcctatccataatgggtaggctcttattttataattcaaacgtgctgcgaattaattcggaaacgctcatatctttgctctgtgcgatttccttcaatttggtaaattccgcatcattaagagatatcactctctgctttctgcgattctccacacctactgtgataggcgctccggcaccttcacga

SEQ ID NO: 36350 - DNA, 260 bp, Unknown
  Description of Unknown: RightRegion for integrase B10351 sequence
tctgtcctgccacccgcaacgcatccgaaccacgtccttatccagtacgtcgtccggatgtgaatgaaaagagagatgctacatttttgtagcatctctctttcgttaccgccgattccagtacgggtcgatttcttcccgcggatcgtaggaccgcgccccggtcctgctcatgtagcgtccggttgtccggctgcgtccacgggcataggacctttcgctggttccgtcctcgctttcgcgcatcgccctgtaggttg

SEQ ID NO: 36351 - DNA, 260 bp, Unknown
  Description of Unknown: RightRegion for integrase B10352 sequence
caccgaatacccctatccataccaaccgaggaattttacaataaaaaagcggcatgggcttagacccacgccgttttctttatgaaacattttcgtcattctgtgtttcacgtgaaacatttttgcctttgttatagttggacaatccattggcggtcagacttatcagcatggctgtgagggccgctgggattaagttaatgattacgtcaaacaagatactgccagcaagcgataagacgccatcaaaggtgacagcg

SEQ ID NO: 36352 - DNA, 260 bp, Unknown
  Description of Unknown: RightRegion for integrase B10353 sequence
aaggcgaaccttttccaatatgtaaatcacagatatccacttcgactgatcatgcctatataatacacaagagcctacccatttggataggctcttattttataactcaaacgtgctgcgaattaattcagaaacactcatatctttgctctgtgcgatttctttcaatttagtaaactccgcatcattaagagatatcactctctgctttctgcgattctccacacctactgtgataggcgctccggctccctcacgat

SEQ ID NO: 36353 - DNA, 260 bp, Unknown
  Description of Unknown: RightRegion for integrase B10354 sequence
gatggcctgccaacacgattccatccgaactcgcagacaatggtcttcaccgtgctgctgtgatggaaacgaaaaaatggtgcaaaaatgcaccattttctttttgtcgtcaatgatcagccattatcaggaggttgcttctcaacttctggcaggcccgtcaaggccagcagccatgcggaaacgaaaccgaaagcgcctgcgctcagcgcagcgatccagtttacgtcacccagcacggctgcgccagcgccgatata

SEQ ID NO: 36354 - DNA, 88 bp, Unknown
  Description of Unknown: RightRegion for integrase B10355 sequence
tatatccgccatgagggtaagggaaagatagtatatgaattaaacatttttcttttactttgatatgtgcaacatgaggaggtaagtt

SEQ ID NO: 36355 - DNA, 260 bp, Unknown
  Description of Unknown: RightRegion for integrase B10356 sequence
gcaccaaaaaaagccgcaatgttaattgcggctttttcctttatttgcctaagtataatctaagagattgacagggggaaggcctggcgtctataagattccgccttcttgaacacagcaaagcagtatttcatcacgctgttatcatggggcgttcccgaattggagaacatattaaatttcttcagtagctggcggaactcatggaaagtatattgactatcttgaattattgtagaagatcaaattatctcctgaca

SEQ ID NO: 36356 - DNA, 61 bp, Unknown
  Description of Unknown: RightRegion for integrase B10357 sequence
ggctcttccggtgttcggatttcaaacgatacgccccgccacgtcgcaatgcgcgacgctt

SEQ ID NO: 36357 - DNA, 260 bp, Unknown
  Description of Unknown: RightRegion for integrase B10358 sequence
tgcttcaatggtggaggcgaattgactcttctgaagcacctaacatttccgtatcagaaatagcgggaacctagtcttattagttctcgttaaatttgtcgcaaaacctttaatctgtcgcttggcagagcacaaattcagagagataattgtttgaaaggaaagaggagatgattttgacagaaattatcgaaggtatcagcaaaagtgtttcagttcgagaggctgctgaatttctcggtaaatctcaacaatttatc

SEQ ID NO: 36358 - DNA, 208 bp, Unknown
  Description of Unknown: RightRegion for integrase B10359 sequence
gatttaactgctatggtggagcgtagggggatcgaatcgcgacgctcagcctgcaagccttgaaaagagaggaggttgcacgccatcattttttcatctaatcacacatctaatcatcgcagtcctcgtcaaacagttcgtacacagccactatttcattgccacacatttctccgttctccacaaaaccatacttgccatatatatc

SEQ ID NO: 36359 - DNA, 260 bp, Unknown
  Description of Unknown: RightRegion for integrase B10360 sequence
catagcattaatatatctctaatcaactcttgcatcactgtatatactgatattatgcattaatcaaataattttctatatcatattataccttattatttcaaattcaaacatcgaacactttaatattgaatactaaaaagaagcagttagagacctctgcttcttttttaagcggacttaagctggttatattttttcgcgtgatcaaagagataaacaaaaattaaattagtacatatttgtactttaatctattg

SEQ ID NO: 36360 - DNA, 260 bp, Unknown
  Description of Unknown: RightRegion for integrase B10361 sequence
aacgtgcatacacgaacacttacagacggtgttgttctactgtcaataatgttcagaccataaaaaaagaccggatgcaaacacatccggttttgttgtattcgggtacctgtgtcggctcccaaaacacagatacccatgttcagaaggaaactgaaaagggaatgtcaaattgaagtcagttctttgatggtatcatcaattgccttgtcatttttctttgttggttctttcagaattagcagaatctgaaccagtgc

SEQ ID NO: 36361 - DNA, 260 bp, Unknown
  Description of Unknown: RightRegion for integrase B10362 sequence
actgtacgaaccacagtgaggttccgtgaatatggaatcgttgctgttgtaccgtacaattagagaaagccctgtacgtttgtatacgtgcagggctttttctgcatgcagccgtggtcctccggtttttgtaataatcttacggaattctgatttatcttccaaaatcacacataatagaagaaaatgcgatagattattacaacagaaggagcgaccacaaatgatacggattcacctgtccagactcctcggcgaaa

SEQ ID NO: 36362 - DNA, 260 bp, Unknown
  Description of Unknown: RightRegion for integrase B10363 sequence
cctgtgtttttcttcatagaccacgttttcgggtttgtacttacggttgaaaagataggttaatcgcctatctttttcatttgtgtgatagcctgtatgactttatcatatccacaggtagccacaataaatgataggaagataagaacaactacctctacgattactttaggggtaatcgcttcgcctgtatagacaatgtagcacacactcgctccgagtgtaaatacgattgctacagctacagcgagaagattaga

SEQ ID NO: 36363 - DNA, 260 bp, Unknown
  Description of Unknown: RightRegion for integrase B10364 sequence
gtaaagctgggcgagaaggcgcggtacaggcgggaggtggtggctgtggaggcaaggtggtgacatgtataaatagggaagccccgtcctatttatacatgtcgcaatgtatgtacagtacaactcagcccaagtgatacctcgcgctcagcgtagtcgtcaggtatgtccttgatagcctctcgcagttcgccaaccgtgatctttctctcttcagccatgctccatctccttatccacggctctctccaacctccatg

SEQ ID NO: 36364 - DNA, 260 bp, Unknown
  Description of Unknown: RightRegion for integrase B10365 sequence
aaggcgaaccttttccaattcttaaatcacagatatccacttcgactgatcatgcctctataatacacaagagcctaccattatggataggctcttattttataattcaaacgtgctgcgaattaattcagaaacactcatatctttgctctgtgagatttctttcaatttggtaaactccgcatcattaagagatatcactctctgctttctgcgattctccacacctactgtgataggcgctccggctccctcacgat

SEQ ID NO: 36365 - DNA, 168 bp, Unknown
  Description of Unknown: RightRegion for integrase B10366 sequence
tactactacctgccaccggccggtaagaatatttttatgcctaaatgtcaaacgcccgggtgaggggggcacccgaacgtttgacaggcatattttagcatgtataccaggtgtctacaagataattgtttgaaaatggtttgtcaattttgtaaacgatgatttcac

SEQ ID NO: 36366 - DNA, 260 bp, Unknown
  Description of Unknown: RightRegion for integrase B10367 sequence
tctggtgtaccaatagtgatacatccgaactttcgggttacgatataccatctcgcaatctgatccggatgaaaagagagagccaccttctggtggctctcctttttgttacagctgattttccatccgttccatcagcttctggatctctctccgggtcaggtcgtccggagcttcgtccatcatctggcgcagctggtcggtcatgtctcccttcccgctgtagccgtaattgtctctgtactcgcggccgtatctcc

SEQ ID NO: 36367 - DNA, 260 bp, Unknown
  Description of Unknown: RightRegion for integrase B10368 sequence
ccacaatttttctttgtgggtcacatattcgggtttgtccttgtggtttcgaggataggttaatagcctatcctcgttttatttgtgcaatagcctgtaatactttatcatatccgcaagtagcagtaaggaacgacaggaacaccatagcgataatttctacgatgatttttcctgtaaccacttccccggtgtagattatgtaacctacgcttgcggcaatcgtgagaaccacagccacgattgaaaccaaaaggttt

SEQ ID NO: 36368 - DNA, 260 bp, Unknown
  Description of Unknown: RightRegion for integrase B10369 sequence
acgaatgcgtatatagtgttcgtaggcgggtatatcggcatagtgtgcccgcgtgaattataaccaacaaaacaaaaggccgcacagggtggttatttgccccgtagcggcccgtttttattgtttgtgggtaattatgccgttgtggtttttaattctcaaaatggcccgttttttcggctgccagtacacactcgcgtatataggcatttaaggatagccccagcgccgcggcgcgatctttccacgcgtccttcgtg

SEQ ID NO: 36369 - DNA, 260 bp, Unknown
  Description of Unknown: RightRegion for integrase B10370 sequence
agtccccgcgtcctgcacatccatgtggaatcgcttctcggggttagttctcagaccggatgatgtggtcctcggaaccaccgacgatgtgtatccaatcggtaacccgattgacccacagcatctgcttcatctccatcaggtcttcgagggtgtagcccttctgctccgggacgatgatcgtgtgcaggaagctattgatcccctcgacggcgtagctccctttgaccccgttagctagctcgcccggataggcgacc

SEQ ID NO: 36370 - DNA, 260 bp, Unknown
  Description of Unknown: RightRegion for integrase B10371 sequence
gattccattgactacggtcagcgtaaaggtgggaaggctgttctggaagtattcttgaagtaagggctatttttttagccctatgttagtatcctgtgcgctccactttaatagaactaacaggatgcatacatctatacaatccgcatcatatcagcattataagccatgacgaagcaaaagggaaggtgtcaaaaccttcccttttttgtattgacttacagaattttcagatttataatattttcagtcttttgaaa

SEQ ID NO: 36371 - DNA, 260 bp, Unknown
  Description of Unknown: RightRegion for integrase B10372 sequence
ttccaaaccctcgatttctttttccatatgacagcgagaacaaccatccaacaaaccgtatgaacgaatccgtcacactcatccccattgaactcatccgaattctgaacccgcgagccagggatcggaagaaatttgaaaaggttctcaacagcattcgaaacctcggcctgaaaaagccgatcaaggtaagcaaccggatcgtcaaagacggcgaggagccgggatacgatctggtttgcgggcagggccgcatcgag

SEQ ID NO: 36372 - DNA, 73 bp, Unknown
  Description of Unknown: RightRegion for integrase B10373 sequence
gaaggctgttcgactgagaagcaaatggtccgagtggcgagaatcgaactcacggcctcttgaaccccattca

SEQ ID NO: 36373 - DNA, 260 bp, Unknown
  Description of Unknown: RightRegion for integrase B10374 sequence
ataatatatgattatgatactggttctttaaatattattttgctaaaaacaggggtaatttaagctggtctggatgtgcagtacagttaaaacaacctctatttatatgaagtttatggaaatagataagctccagcttaattttaggctggagcttttgtttactatttctgtggttgaaaatctacttgatttaatgacattattgtaattatatctccctcatttaaatttgcagttacctgttgtactcctccttg

SEQ ID NO: 36374 - DNA, 260 bp, Unknown
  Description of Unknown: RightRegion for integrase B10375 sequence
aaagaaagttcgtctgggatgcgtctggtccgagtggcgagaatcgaactcacggcctcttgaaccccattgtgcttctctcgaaaacacaatgtacgatccgatactgcctagactcagtatcgttaaatttcaaatgtattatatcattctgtttcatttttcaacttgggtatactcctgttgtgtccgacatgaataaaatcgttcagaaaactgttgcatcgtctttccccacatggacgttagctgtatgagat

SEQ ID NO: 36375 - DNA, 260 bp, Unknown
  Description of Unknown: RightRegion for integrase B10376 sequence
atttcaagtattatatggacaaaacaaggtgacaatattgatattaaagtaaattttctataggctcgtaacagccgaagattctgtgtttcgagtggagcaagttttaaacttgccattggtgccacgtgtagaactttctccatctgaagacacttgttacgagcataaaaaataagggactatcaaaagatagtcccttaaatatttggaagtataaaatgtggtgattgagatatggtatttatattattgccgtt

SEQ ID NO: 36376 - DNA, 260 bp, Unknown
  Description of Unknown: RightRegion for integrase B10377 sequence
tggctagtgtgcgcgatgcgcggcggcttcaccctcgtggtgccctttcgcctctcgcgctaggcgaccttcagaacctggccggcgtagatcaggttcgggttggcgatcccgttggccgcggcgagcgccgacaccgtggtgccgtactccttcgcgatggagctgaggttgtcgccggacttcaccgtgtaggtcttctgcccgatgccctgcgccttgttgatggcgtccatcacctcgtcgtagcggttcgccag

SEQ ID NO: 36377 - DNA, 260 bp, Unknown
  Description of Unknown: RightRegion for integrase B10378 sequence
acgaatgcgtatatagtattcgtgggcgggtatatcggcatagtgtgcccgcgtgaattataaccaacaaaacaaaaggccgcacagggtagttgtttgccccgtagcggcccgtttttgttgttggtgggtaattatgccgttgtggtttttagttctcaaaatggcccattttttcggctgccagcacgcactcgcgtatataggcatttaaggatagccccagcgccgcggcgcgatctttccacgcgtccttcgtg

SEQ ID NO: 36378 - DNA, 260 bp, Unknown
  Description of Unknown: RightRegion for integrase B10379 sequence
tacgccaggccaaagggcggaacaattgatgatttacggctgaaaatctactatatcatgtagattttgcaaatattattcggggtatagtttcagtttgtctatgaatataaacacggaaactataccccagaaaccacaaccgccggaggaaagggaaccactcccctacctccggcaaatttttttcagttttttttgattttcctattgacataccacccattgagtggtattataatatcaacaaaagggaacac

SEQ ID NO: 36379 - DNA, 260 bp, Unknown
  Description of Unknown: RightRegion for integrase B10380 sequence
aataacaaggatgaactgataataaaacttatcggtgggcttgaattcacagagctgatataggagaaataagatgaaaaagacacgctttataccatacggatatacgatacgggatggacgaacagtaatcgttaaaaccgaagccgaagtaatacgggaaatatttaaggaatacatcaagggagcctcgctcaaagagatcgccgagatgcttactatccgaaaagttccgtatacagagaaaaccaatgtatggg

SEQ ID NO: 36380 - DNA, 260 bp, Unknown
  Description of Unknown: RightRegion for integrase B10381 sequence
tccccaaggggtggcgacgtagccccggtagagtggtcaagcaaaactgcggtcagacggtgatttcgccgctcggcaattcaatggggcctgctatcctgttgacaggaggtaacagccatgccactgacaaagtgtaaggaatgcggcaaagcgatttcatccactgcggagaaatgcccctgttgcggcgcccgggttggctccgtgctaaacaacatcaaggacacgctaagagtgatcgcagccggctttttgct

SEQ ID NO: 36381 - DNA, 260 bp, Unknown
  Description of Unknown: RightRegion for integrase B10382 sequence
aaggaaaaacaccagcgattggatgactttgaactgaaaattttcttgaagatacacagataacctgttggtgttaatgaattaacatctacaggttatctgttttgtggatactgattcggccaatatttcggccggccgcacctcacacaaatgaggatatagcgccggccgacttgcttatatctccactttcccgccgctttgcattcgcatattccattcttccatagttcggcgtcaagttcgcgttgattcat

SEQ ID NO: 36382 - DNA, 260 bp, Unknown
  Description of Unknown: RightRegion for integrase B10383 sequence
ccgaacttttcggtcttttttatagctgaagtgttcgggatgataaagcaccgggaggcataaagcccctcggtgctttgttttatataaaggagaatggcaagctaaatcttgtagagatacttgacgtctactgctccggtgacggctccgtactgattcgtagagactacggcgcggttgccgtcgagatagcggacgtagagtttttcgtgatacacgaagggaagatagggcgtattcgttccgtagacgggtgc

SEQ ID NO: 36383 - DNA, 260 bp, Unknown
  Description of Unknown: RightRegion for integrase B10384 sequence
tctaatgtcgggtttccgctatattatacagtagcgacaactataataagaaataaaaagtagcccggttacgggctacttttatttgtcctaatgtccggagttatttgtccagaactctggacacttgctacatcaccctaaccttgataccctttcattctagctagcaatatcataatatcgccacgtttgataggtgcatcaaaattcttttcatgcaccactacaccattagcatttaaaaaatcaaatgccgg

SEQ ID NO: 36384 - DNA, 260 bp, Unknown
  Description of Unknown: RightRegion for integrase B10385 sequence
tatattgcatgggaaggcaagggaaaagtgcgatacaaactgcacatccagttgcttctgtgatcgtgcgcccaaggggatgtggagacgcattattttttatgcggcatgtgtacaacaagggtatataggttcgcacacttccccaagttgtacacattcgcaaacccttgtcacacctgcattatagcatccaacagtccagtgggaaaccgctggattgtttttattatgtttcttcttcctctatcatattgagt

SEQ ID NO: 36385 - DNA, 60 bp, Unknown
  Description of Unknown: RightRegion for integrase B10386 sequence
ttaggggcaccaaaaaaagccttacggaaacgtaaggctttttccataatgattgccgct

SEQ ID NO: 36386 - DNA, 260 bp, Unknown; identical to SEQ ID NO: 36384
  Description of Unknown: RightRegion for integrase B10387 sequence

SEQ ID NO: 36387 - DNA, 260 bp, Unknown; identical to SEQ ID NO: 35841
  Description of Unknown: RightRegion for integrase B10388 sequence

SEQ ID NO: 36388 - DNA, 260 bp, Unknown
  Description of Unknown: RightRegion for integrase B10389 sequence
cttttcgtagatagacgaacagtgactgaagacgggcacgttctcttgttcatcaaggcataaaaaaagaccggtcacgaagaccggttttttgttgtttgggtacatgcggtaaaaaggtttgaaggaaaaaacccgcatgcaccctatgccaagaaaggaggactactttcggggcgtcagattgatgataattctttgattgtgtcgtcgattgctttgtcgtctttctttgtcggttctttgagcagtaacagtat

SEQ ID NO: 36389 - DNA, 260 bp, Unknown
  Description of Unknown: RightRegion for integrase B10390 sequence
gcgagccgcattgagccactgtggaacgagcaggatgaggcggcagaccgggccgaggcgtagcgaccgccccgagcctcgtcccgacgacggcccttgtaccccatctcgggtacaagggccgtcgtcgtctgtgcgtgaagcatcacactggacgttcacccgaacgtgtgtaggttgtagcgcatggcaaccaccgtcgtcggcctcatcggcctcaagcagtccggcaaggacaccttcgctcagcgcctcgtcgc

SEQ ID NO: 36390 - DNA, 260 bp, Unknown
  Description of Unknown: RightRegion for integrase B10391 sequence
tacccgactgtgcgcgggatgtttggtcttgatgcgcccagctcgctggagtccacgtgctgaaggcgtacgccgaccgggccgcactgtacctacgagcctcaaccgagcaccaaaactactcgaccgagcatcaagaggcggcgctgcaggaatacgcagtggcgcacggtttcacagtcgtgacggtgtatcgggataaggggcgcagcggtctcaccctaggcgggagggctgggctgctcgagctgctcaccgac

SEQ ID NO: 36391 - DNA, 260 bp, Unknown
  Description of Unknown: RightRegion for integrase B10392 sequence
gtgaagcgtattatttataatcgtcaagatgacaatgtggtattagaggtagagtatttataatggtgtaaatagcatctatgccaccagtggcatgtaagtcatttactgtatttaagataaaaagaaaagcccgtgtttcagggctttttggatttaattattcgggagacggtttgattaagattctctatcgcctctctagatggcttatttagttcaattacggtgaaagttattttacccatagtttacccctt

SEQ ID NO: 36392 - DNA, 260 bp, Unknown
  Description of Unknown: RightRegion for integrase B10393 sequence
atgctggcgtcatcgtgtacgtcaccagaggctgcagtagatttcatggggagactgggatgacgctgaaagaaaagattcttgaactaagcggcgagtatctgttggtccacaagtcacacatcagaaccatgcaggtgtatgacatcgctaagagcgggtatctgacccgggctgacatcatggcgatgggcagcgatatatgtcctgacgtcgagatcgtgtactccaagctcagcatggaggaccttctgaagcag

SEQ ID NO: 36393 - DNA, 260 bp, Unknown
  Description of Unknown: RightRegion for integrase B10394 sequence
cacttgttcgccccgccggctgctcgatcgcggaaatcgagcgggaaacgaaggcgaaagtgaggacgacatgggcatcgagttggaaatcgcgaacgacatcaggagcgggctctcgcaccggttcggggtgcagagcgacaggatcgacgtgcgggtgcacgaggcgagcgtggccggcagcacccgcatcgaggtgagcctcgacggggcgccgatcccggaggcgtggcggcgggtgctgcaggagcacttcgagg

SEQ ID NO: 36394 - DNA, 260 bp, Unknown
  Description of Unknown: RightRegion for integrase B10395 sequence
atagcagaactcaaaaaagttgtcaatgaagaactttatgtcaatttgaagttggttgcttaaaaattacacccgtcagaatgccctacaacgagagtttttatatgtccgaatggttttatacctccgtttttttgcataaaaaaagcccttacccgaaagtaaggacttctttttgaagaacagtaaaagagtaaaaaatgaaaaggaacttatgaaattttgaaacattgtttccggttcttatttctaacaaaaga

SEQ ID NO: 36395 - DNA, 260 bp, Unknown
  Description of Unknown: RightRegion for integrase B10396 sequence
ggttttgacgctgttccgcacgtcaggacagtgggttgcgttcaggtgaggcgggcagcgtagcatttcgggggtggctggttctactccgcagcacgaaacgcccgattggatcgacgcccgctgatctacgagccggccacgaacctctgcgcgtcgtgccattggctcacatcgaaggtgaccttctaccccgtcggcccgccggcggtgtcgttctggtgcggtcgtagccacacgaacggcgtgcctcgcgttcc

SEQ ID NO: 36396 - DNA, 260 bp, Unknown
  Description of Unknown: RightRegion for integrase B10397 sequence
atatgggataaagatggatggacaagactaccatcaacaaacaaaaaagaggaagatttttaagtcttcctcttctatatcaataagctgttctatgaagcagatctgaaagtttttgtacatccagcagggaacgaatctgacttatatccacagccatatggcaactctattgaagtcaagctagaacatcctttaaatgccattgttccaatcatgttgattgagtctggaatagttacagatgtaagattggtaca

SEQ ID NO: 36397 - DNA, 260 bp, Unknown
  Description of Unknown: RightRegion for integrase B10398 sequence
atgctggcgtcatcgtgtgcgtcaccagaggctgcagcagactttatggggagactgggatgacgcttaccaaagaggagaaactgatcaggtatcttgaggcaccaaagcctgagcaaacacaaccagctcatccctgaaaatctgaagacgaccacccaaccagaaagacccgaggtagtaacgcacctcgggtctttttttattctgcagtcccttgagacaccagttgcgaaccgtgtctgtcgtcacttcaacgc

SEQ ID NO: 36398 - DNA, 260 bp, Unknown
  Description of Unknown: RightRegion for integrase B10399 sequence
ctgctgcccggcacgctcacgcccgtgccacgctgggggaagggtctgcgatccgtgggttaggtccgttcattcccgaagatcggatcacaacacacggatagagtggctatgtgatttcgccgcagtcagcgcagatgtgatgcctgcgcttgtcccattcgctgatgtatgcccgccagttgtgacaaccacgacggcgacacgcaagatacaactgcttccgaacggactcccggtgcgcaagatcgttcagcgtc

SEQ ID NO: 36399 - DNA, 131 bp, Unknown
  Description of Unknown: RightRegion for integrase B10400 sequence
gcccccgccgaccccggcagcggtgtttgtatttcaaagcctcttctccatagacaaagataaaagcaccccggaataatctgaggtgcttttttcgtgttttagcctgagatcagcttcaaacatcgccg

SEQ ID NO: 36400 - DNA, 260 bp, Unknown
  Description of Unknown: RightRegion for integrase B10401 sequence
actgaaacaggaaaggaattcaacatcacgatttatcctaaactgtcccacaaacccttataaatcaacgggttgcatatttttatctttaatgggtatcatcacacgtaccatgtgtgattggtgtggtgatacccacataaatatgaataaataagaaaaggggtgtccaccacggacaccccttctttttagattttcttagtgtaaccaagatgaatccaaccaaccttggacttcaatcttccccaagaaccatt

SEQ ID NO: 36401 - DNA, 260 bp, Unknown
  Description of Unknown: RightRegion for integrase B10402 sequence
acgacggttcaccatcgcatacgcatcgtgaacaccttgctcggcataggcttttcacggtaaaaaaataaagcgggctttatgatgagcccgctttctatattcctctgtgccagcttccgcttgccttcgggaaagctatgccgggatgccaggtcccgttgaccttgacccacgggactccccgcttccagtgtcctgacacttttacctgcgctgttcccactttgagcgggatgtttgtctgcgtgtctgtcccg

SEQ ID NO: 36402 - DNA, 260 bp, Unknown
  Description of Unknown: RightRegion for integrase B10403 sequence
acccatcaaaagccgaacatggccattatcgggacggttctgatgttcgagatggtggcataaaattaaacccggagggttattccttccgggttgtttgttattcttccgtccagcccatctcggagaagtcgaggatgtcgccgctctcgacgaagtcgccgtcctcgtcgtaccgcgtctcctccacatagtactcggtgacgaggtagtaggcaccggccgcgccgctgtatttgctgacgtcgctcctgtaggtt

SEQ ID NO: 36403 - DNA, 203 bp, Unknown
  Description of Unknown: RightRegion for integrase B10404 sequence
ctggagacggtgggactcgaacccacgtccaaaatggaccaacacctgcttctacgtgtgtagatattaatccgctcaactgtttcgggaaaatatcacaacccttaaaacagccctaggttttatttggtggaaactctaaaccactgatggttatcttgatatgtctaccatcatcaacatactgcgtcttgcataatgga

SEQ ID NO: 36404 - DNA, 260 bp, Unknown; identical to SEQ ID NO: 36401
  Description of Unknown: RightRegion for integrase B10405 sequence

SEQ ID NO: 36405 - DNA, 260 bp, Unknown
  Description of Unknown: RightRegion for integrase B10406 sequence
gggcccgtgcgcgaggtcaggcgcaccttcgaccccgcccgcgtgctgatcacgatcccgtgacctaatctgcccgcagcggtgcccgccagggtccgttagccagtagcagcccgcccgccctcgtcgcaggcgggctgctgcgcgtcagggctgaggcgtgacgcagggatcgacgggcgactcgccgctgcagtcggcatagggcggcacggtcggctggtcgatcttcacgtgccgactcgcacacgaactcgcca

SEQ ID NO: 36406 - DNA, 260 bp, Unknown
  Description of Unknown: RightRegion for integrase B10407 sequence
ttgaatccgaacaccccgataatcattaaacattgctttgtgttttgcaaaatgtggttttaatttgtgttgaaaaacaattaacgacagtgtataatgacaatatatcgttatgtgtatagcatattgaatttattcctttctaaaaagcgtcacggcaatgacgctttttttattttcttgactaatccttgactaatccttgactaaataaaaaaagagacgcaatgcgtctctcgcctaaagaaattagaagccga

SEQ ID NO: 36407 - DNA, 260 bp, Unknown
  Description of Unknown: RightRegion for integrase B10408 sequence
gcaaagaaaatgagaggctggataaacatgccttcaacaatagaaattgaattcaagttataatatcataggtacatgggtggaacagattcttagttaccacccttgtacctgtaaaaaaacaatacatttcaatattttgtattgacaatcatatacaatgtgatataattgtattagaaagtaaataaaacaaaaaagttgtgctaacggttacgggcagaaaaaggaggattaatatgaatgaaatagaattaata

SEQ ID NO: 36408 - DNA, 260 bp, Unknown
  Description of Unknown: RightRegion for integrase B10409 sequence
aaaccgccacccgatgacgggccccggaaggttctgcggtggaaacgtcgttcgaccgtctgaagtctctcgccgagctcgcgctctacgtggtcccgatcatcggcatcgctgcggcgatggtgcgtgcctggctgcacgaccggcgataggatcgcgccccgatggcaaaagcaccgcgcgaaatgatcgtcccgcccggcggggagaagccacctccgggacgcacgaagccgatcccgcaggttcgaaagggaaag

SEQ ID NO: 36409 - DNA, 260 bp, Unknown
  Description of Unknown: RightRegion for integrase B10410 sequence
gactcaaagtatcacgctcatcaagatgtatgggtcactttgcctcaaattgccgcaagatagtttcactaattttccatttgttagttatttatgaacttctttttgattagagaagttcttttttattataccgaataatattatctatcacaccccgtaacacactcacccacgccacaacacgccctgccaccgtatcccacagcctaacacaaagagaggtgatcccatggcatacagatcctttcgagacgatg

SEQ ID NO: 36410 - DNA, 260 bp, Unknown
  Description of Unknown: RightRegion for integrase B10411 sequence
atcaagtacgagaagctgccgtggggtttccagaaggggaacgtgcgcggcaagagggcctaacggctttgcccaacctgtcctagtatcaatttgagcgtgctcgcaccgacctgtgcatggtggtgagtctcggcaccattggagccatcggggatcttcccgatgcctaccaaggaaccctgaaccatgaccaccattcgcacccgcctgcgtgtgagccacgtcgacaacctgacgttcatcgtcgatgacgacat

SEQ ID NO: 36411 - DNA, 195 bp, Unknown
  Description of Unknown: RightRegion for integrase B10412 sequence
ttacgtttgttcagtgatctagggttggaagaaaccgttctagttaacgacatctgtacataaggacatggacgagcgcctgcccaagatcaatcaaacgctgtatcgccaggtacgccgtgtgttaagctataacaagtccgtgcgtcacctgcgcggaggagaggccacccgtcggaaataccttcaccgctg

SEQ ID NO: 36412 - DNA, 260 bp, Unknown
  Description of Unknown: RightRegion for integrase B10413 sequence
atacctatttcagatgatcctttcccttggcactcaacgaaaaggggcaatactaaaaagtaagggtattacccccctcttatctcaataagtagggggtaataccactaaaaagtaatgaagaaaacttgaggttattttgaggttgtttcgaggttatttatcttaaatccgtatgtcttttacatttaagacattgccacaaattaggtttaacttctgaatgctttttcaatttacggcatgtttgacaactcatt

SEQ ID NO: 36413 - DNA, 260 bp, Unknown
  Description of Unknown: RightRegion for integrase B10414 sequence
gaatttattgagcggaagcgccgccagacgcggttccggctgcatattgacctgctgctgtgagggcgcaggtacaatgtgtacatcatgggtatgtaggttcacacacttccctatgatgtacacaccgaaaggaggtgtacactatggaaaagaaacgcatgactaccaaggaaaagttggcgctgatggatcagatcaaagagcgcaacgagcagcgccgccaggaattcgcggagcaggaagccgcgaaaaaggcc

SEQ ID NO: 36414 - DNA, 260 bp, Unknown
  Description of Unknown: RightRegion for integrase B10415 sequence
ggtggcaggtggaacgaagatgctaggtccaatttcatcatagaactttttatgaaaatataatttctatcttctatgtactaatgaataggtacataaatgttgtacattatagcataaaaaaataaggagcatttctgctccttttcttattttataatcaacttttgtcctacacttatcttattaggattgctgatgttattatcttttgctattttttgatatgttgttccatactttttagcaattccacttaa

SEQ ID NO: 36415 - DNA, 260 bp, Unknown
  Description of Unknown: RightRegion for integrase B10416 sequence
actttcagaagagttattgataaacatgtcaggaagttcagaaatggcagtctgaaggggtgattcctgggggctggtgggtttcggctttgccgcggcgcgcggaaaacaccgccatgctggcttatgttttccgctttgcgtttttccttgccgggctggtcgcctcgttttttttgattttttatctggttcacgctccgtgttctggtaaagtagaaatgaggttttccaatgccgcacggatcagaactcaagca

SEQ ID NO: 36416 - DNA, 260 bp, Unknown
  Description of Unknown: RightRegion for integrase B10417 sequence
gctagagcttttattgaaaaagttattgtatatgataacaagatagatataatatacaagtgagtatattttactattatatcttttctatcaagtaaaaacataaaaggaaaaacggcattttcaagctacataagcctttgcagttttaaacttatgaattaatttgcaaaaacacaggaattatattataccaggaggacaagcaatatgcaaacgcttttgattataacaacaataattttattttcgttggttta

SEQ ID NO: 36417 - DNA, 260 bp, Unknown
  Description of Unknown: RightRegion for integrase B10418 sequence
cctccacggaacgtgtgccatatattgccccgggcaaattacaccagattcgtcaaccgttaatcctcgcccggctccgtcggctgctgatccggctgcggatcaggatccggataatatggaacgataggctgcggctccagctgcgtttctgtcctggctgatccgccgggcagctgcccaccgtgcgccggttcgtccggttcgcccttgcgtctcatgatttcgagcgcatttttcagaatgcccggaatcggtac

SEQ ID NO: 36418 - DNA, 260 bp, Unknown; identical to SEQ ID NO: 36306
  Description of Unknown: RightRegion for integrase B10419 sequence

SEQ ID NO: 36419 - DNA, 260 bp, Unknown
  Description of Unknown: RightRegion for integrase B10420 sequence
ggatttggccattggatgaccgaacctttggtaattcccctcaccgcaaggcgcgaatcttaacgggttggcccagcctgaggcaacccacagtcgttcaggtgggcgctcccagcccctgagacgcccccggcgtaccctgccggcatggccatggcccgcaccgaccccttcaacttcgacctgtccctgcaatgggctagccgtcagcccacgttcgcctgccggcgcaccggagaccgcctggaatacctggtgga

SEQ ID NO: 36420 - DNA, 61 bp, Unknown
  Description of Unknown: RightRegion for integrase B10421 sequence
gggacgatctggtactttacaccagttttggcattgggcgagtgcccccggcgggagtcga

SEQ ID NO: 36421 - DNA, 260 bp, Unknown
  Description of Unknown: RightRegion for integrase B10422 sequence
ccacggctacgcgacactatccccgctatcaagttggctaggctgcttaagcttgcggcgtgaggtaggggcttgctctgcaaggcgtttctgctcaagcatttcataaagcataggaccaagtattttggctgcttttttggcgtctggcttatttgcagtgataaattctatttcaagcatttttatgtacctttgctcgataggtcttagttatggccatgtttatgcaatggcctttatctctaagtgcattagct

SEQ ID NO: 36422 - DNA, 260 bp, Unknown
  Description of Unknown: RightRegion for integrase B10423 sequence
gtgtatcacagcgttgggatactgccgcttaaaggcggctttggcgtgctgctcgcagcctagtaattgctgccaggcgtgctaacaaaaatgcccaccccggcagagccggagtgggcgaagcgctatttgcgactgatgaaaaggcacatggcaagcacgccaatggcggcacctagctgcgcacttaaaagtgccgtgatgatgtgacttagcatttcaaatcctaactacgctgcatagagcttgcgcttgattgc

SEQ ID NO: 36423 - DNA, 160 bp, Unknown
  Description of Unknown: RightRegion for integrase B10424 sequence
ggaaatagatgggataaagatacacaagataaattcactcttgaattagagctattcctataacatacatcataaatgttcaatagaaatggcccatgtagaaatacttggaaccatggtatatcaactaatgagcaatgcatcaatagatgaaattaaa

SEQ ID NO: 36424 - DNA, 163 bp, Unknown
  Description of Unknown: RightRegion for integrase B10425 sequence
gagtcagcctatcaggcctctatccgaaatggaatcatgtccttcgctgtggcgcgattctaggccgttagaggccttttctatttttgcggtcttgttgttcatcctccgccaaaatcgctctgaggctttaaacgagccgccacagggaaagaaacagaag

SEQ ID NO: 36425 - DNA, 260 bp, Unknown
  Description of Unknown: RightRegion for integrase B10426 sequence
tctccattttctgcagattctgaattttgcgcgaaattgcggtggcgatttccggaagtttgaaccggtattcgccttaaaggccttatcttatggccgtattgataaaattatacgccgtttacggttattttacaaggaaaatccagcctcctttgaggttccggcctttgctcaaaaagtctactaagataaggctattactgccgatacgagtaaataaataccaatgctatttaacacaaacgacaataatgcaa

SEQ ID NO: 36426 - DNA, 260 bp, Unknown
  Description of Unknown: RightRegion for integrase B10427 sequence
tatcgcaaagagaagcaccagcgaaacgatgattttaatattgagttgttccctaagttgtgatcatttacagataacctattggtgttaattcattaacataaggttcttatccgtgttgataattatcttagataatcaggccttgtatccacaagcgtccatttcccttttaaaaacatacaacggtctatatatccttcgcgctcgagttcgatcacttgtccctctctcgccttttttggtaaacgatcagcata

SEQ ID NO: 36427 - DNA, 260 bp, Unknown
  Description of Unknown: RightRegion for integrase B10428 sequence
accgtgttccatgatgggagtttggtgtttctattccgagatgggacggagataaaagtgtgagataattgcagccctgttggagaaatccggcagggctgttttttttcataactcaagtccataattgtaaaatcccagcccacagggctactttttcactccttttttctctccaaaacccacttaattttattaagtcaaatcgaaaccccttaaaaaacgccacctatcgtttgctttttgaaaaaacgccgagc

SEQ ID NO: 36428 - DNA, 260 bp, Unknown
  Description of Unknown: RightRegion for integrase B10429 sequence
tcgatcccggtgcgtggtggcgaggctgcacgactgcgcctgcgcgccgccaggaccgcgtgatgccgctctccgacgtgcagcgtgcggacatccgaggcatggccgccgagggccagagctgcaccaccatcgcggccgcgctcggcctgtccgtgggcgccgtcgctggatcgctcaacggagggaggcacaccaaggtggacgcagcgctcatcgaccgtatccggctgctcgccgacgagggcatggaccagagg

SEQ ID NO: 36429 - DNA, 260 bp, Unknown
  Description of Unknown: RightRegion for integrase B10430 sequence
cctggtttcgaccgggcctcagtcgacgtcacggcgaggtatccggggggcgagtcatgctgactaccggggaaaagctcgcccgtgccgaggcgcggcgcgtcgccgccgaggtcgcccgcgaggagcggatcgacgccatactcgccgccgccccggcgccgagccgggcactagtcgaccgggtaaccgagctactcaacgggggcgcggaatgagcggcgtcgacctcggcccctgcgcttactgcgggctgccgc

SEQ ID NO: 36430 - DNA, 199 bp, Unknown
  Description of Unknown: RightRegion for integrase B10431 sequence
tactacacccgccaaaaaggcccccactcctcaccattcaccctcgaatgtgaatacctttaaccattcttctatcccgcctactcttgtgacaaagaatgtcttgaagatatacgagtttaccttactgtgggcgaccaggaaattgttgaccgtgctgtgagcattaaagcaactactgccgaacttatctgggtaa

SEQ ID NO: 36431 - DNA, 260 bp, Unknown
  Description of Unknown: RightRegion for integrase B10432 sequence
cagagcccgaaagctgtcgccgcgttcgcggatgcaaccaagcgagcagtcgagacagtttgacgtacttccgtccgccgatctcaactcgcgataagcgatcgccgtttctcccgcgagtgctccactttcggacagtgctgacgtccaaagtcaagccgtaacgggtctggacaaacgccacgatttctttggcgctgaggagttgctccggagtttgcatcgaggggggccttatagaggacaaacgggaatgttgg

SEQ ID NO: 36432 - DNA, 61 bp, Unknown
  Description of Unknown: RightRegion for integrase B10433 sequence
cctgacaccgttataaagggatggggagaaatcaagaaagatatttatattcagagaaagg

SEQ ID NO: 36433 - DNA, 260 bp, Unknown
  Description of Unknown: RightRegion for integrase B10434 sequence
tttgttgatgaaatagtatataataaaaaatccgcaaccgttgatataacctactttttgtaggttatatctttttgaagtacggcggccctaacggcgaagcaaacgctgcgctgcgctatttgtcacaacgtttttcaatgcccaatggcattacaaaagcgactctgacagacatcggcactgaggagcttgcccatcttgagatggttggtacaataatacaccaacttgcaaaaaatgctacaacaggcgaaata

SEQ ID NO: 36434 - DNA, 62 bp, Unknown
  Description of Unknown: RightRegion for integrase B10435 sequence
agtaaaacacatttcacagtcaaatttttggatagtacatcaaaagaagtatgtattcttta

SEQ ID NO: 36435 - DNA, 260 bp, Unknown
  Description of Unknown: RightRegion for integrase B10436 sequence
cttatccgaacccgcaaaccctttgtccacgacgggtatattgtactacttatcgccgtttagtcaattcttttttaggaactccgaagaacaaaagcccttcttgccgccgccgataacgtaaagccactttacgccatcgacctcggtatagtatccataattctgtgcccgctcgccttttttcaggacggtcaggacggtcttgtttgtgcccgctcctgccctcaaacggaggccgtttggagctgtgactatat

SEQ ID NO: 36436 - DNA, 260 bp, Unknown
  Description of Unknown: RightRegion for integrase B10437 sequence
tcttctaagttttgcgacatctgcactgcaccccaacggtcaaaagcaatttctttgatgtgaaacttctgtcccagttcttcaatgaagttttcgataaaaccatagtgaaccacatttccatcagtggttttcaagtagccttgccgttcccatacatcatatggaacatggtcacgtcttactctgaggggcagtgtttcctccggcagccagaagtaaggcaaaacagaatatatctcatcatcgtctgttggagg

SEQ ID NO: 36437 - DNA, 260 bp, Unknown
  Description of Unknown: RightRegion for integrase B10438 sequence
cggtcttactctaaccctgagattatcgaaggccggatcgtgctgcgcgttttcagacaataaaaataaggcccacagccgaagccgtgagcctgataaagcagcgcaaaaaaggcaacttatgaaaaaacccggtaagagcaaacattaaacacaattatctttggaggtggggatgcagcgctgccattatccacattaatcaacattattcaacatttttcaacattattccggcacgttccaggggaccatggcac

SEQ ID NO: 36438 - DNA, 260 bp, Unknown
  Description of Unknown: RightRegion for integrase B10439 sequence
ttatcctccggtcgaacccttatctgcggatcagcggtcgtgctcatgatttctgtcgcataaaaacaaaaaacgccccggtttcccggggctgtgctatggatatggaggcgaacccccgacctaggggccatctctaaaaatggccggatataccgccggcctcggtgactgttgcaatgttgcaggatattctgttgccgtcctgcatcagcagtgcatgaacttgcgccgcacacacccggcgtcagccgtccgaa

SEQ ID NO: 36439 - DNA, 260 bp, Unknown
  Description of Unknown: RightRegion for integrase B10440 sequence
ccgaactctaaacgaacactataccgtgttggtgaatggttcgtgctgagaattgtagcataaatcccaaaacaaaaacaaggccccggatcgctccggagccttttactattatcaattattcttcttcgttttcgccctcatatatgggcggttccattggttcctttctgacctccgtgtgagctgcatcgatcaggccctcgcccaggatgtacgcaaccacgctggccgcgctcatgatcagagcggtcacctgt

SEQ ID NO: 36440 - DNA, 260 bp, Unknown
  Description of Unknown: RightRegion for integrase B10441 sequence
ccacgggagctaggaaccagccgggtcaacgtcaaggcacgcctccgcgtcgccgagcagtgagattcggtacgaccaccggccggtcgccgccccccacggtgcggcgccggccgagtgtttccggcttccattcgccgcagcccttgcagcaccgccagcagtacagcgcgaccagcccgacccgccacggcgcctccggtgcgccctgctctgcccgcccgagctgggacgcccggtcccatacctgcacctgccat

SEQ ID NO: 36441 - DNA, 260 bp, Unknown
  Description of Unknown: RightRegion for integrase B10442 sequence
agggactctaaacgaacactctaccatgccggcgattatttcattcttaagatagcagcataaaacaaaaaacacccctgaggaacatttccccaggggtatcgtattgcttatgcaatattaaattgcattaatcaattatttttgtaatttcatcaggcggttgcttttcgggtacttccggcaggccagcaaggcttgtgagtatactcagcacaaacgccacgccggaaaccgacaaggcccgcagccagtcgatt

SEQ ID NO: 36442 - DNA, 260 bp, Unknown
  Description of Unknown: RightRegion for integrase B10443 sequence
aaaaacaaatcgaacttcgtattctataaaggatattatatattctatttcaatcttgaataaaaaaaccatctctcgatggttatgcagcttacttagctgctttttttacatttaccgtaatcttgataactgtccacttttctgactcttgttcaccatcaccgtaatcctcttcagtctcagtatcaataacagttaaattatcaaaatctagtttctttaaatcttcttcaaacaattgattcccatcaacatca

SEQ ID NO: 36443 - DNA, 260 bp, Unknown
  Description of Unknown: RightRegion for integrase B10444 sequence
atatctgcccagcaggcgataagtactctcaaatatatggttgatggtgaggtttatttttgagtaataatcactttttcaaccgtgctatagtaagaaagttaggtaagtacaataaaattatctatcctgaacgaagcgtcctgagctatggttttactatagggactgccaatggatgctggcgttctcgttctagcagttcaacaatccccaatcacaaaacaattcactgataacgaactttgcacactcgcctg

SEQ ID NO: 36444 - DNA, 62 bp, Unknown
  Description of Unknown: RightRegion for integrase B10445 sequence
attttcgacatttattggacaagagaaggagataatgtaaccattgaggtaaactttattta

SEQ ID NO: 36445 - DNA, 260 bp, Unknown; identical to SEQ ID NO: 36443
  Description of Unknown: RightRegion for integrase B10446 sequence

SEQ ID NO: 36446 - DNA, 260 bp, Unknown; identical to SEQ ID NO: 36443
  Description of Unknown: RightRegion for integrase B10447 sequence

SEQ ID NO: 36447 - DNA, 260 bp, Unknown
  Description of Unknown: RightRegion for integrase B10448 sequence
atatccgcccagcaggcgataagtgctctcaaatatatggttgatggtgagatttatttctaaataatgatctcggattttaagttatgctatggtgataaagtgcaagacagaattaattatctttgacgaaacttaatgggtaattactttgtttgctcccacaagcgagttttgtacggctgtattggggtagtaaatgagctatacaatcttaatcatttgttaggtgagaactcttggtcgcagattcaaatact

SEQ ID NO: 36448 - DNA, 260 bp, Unknown
  Description of Unknown: RightRegion for integrase B10449 sequence
gcggtttttgtgtccatcacgcccactgccgacaaggtagggttacgttgtgttttgtgctgaatctaacggtgtctaatgtccgtgttcgttactgcatcaccctggcgaccgccgcgcacaattcaccgtgtctaccttgcgccaaccttcgaatcgtgctagactcgggtcatgagcctaccgccgacacgcgccgaatgggtgcggtacctgcgctggcgcgtccgtaaccgtcgacccgagcaccggccgatatc

SEQ ID NO: 36449 - DNA, 62 bp, Unknown
  Description of Unknown: RightRegion for integrase B10450 sequence
cgtacccggagggattcgaacccacgacctttggcgtcggaggccaacactctatccaactg

SEQ ID NO: 36450 - DNA, 260 bp, Unknown
  Description of Unknown: RightRegion for integrase B10451 sequence
ggtttcgaccgggcctcggtcgacgtccggttcaaggccactcccgagggcggcgcggaatgagcggcgtcgacctcggcccgtgcgcttactgtctgctgccgctagtgcccggcgtcggcgaggaggtcgagcacgcccggtcggccgggcatgacgggcgcctgcggtatttctgcccggtcgccccggacgcgctacaccatgccgagccccgtttctgcgtcgagaccgccgcgggctggcagcacctcatgcgg

SEQ ID NO: 36451 - DNA, 260 bp, Unknown
  Description of Unknown: RightRegion for integrase B10452 sequence
tatccgaaccatcccacatttttccacggcttcatcgttttggtcgttatgagagccgcctgatggtcacattgtaccacgagcggctctttttgtaaatgcttaaaaatctattgtgtcataatcaaagcatgtgcagtcttcgtcgtctatgtcacagacatgcaagcggatctcgactgtctgctttgtcctctgtgcttccactcttgcaaattcgattgcctgtcggcggcttttggtcttgaacatttcaaact

SEQ ID NO: 36452 - DNA, 126 bp, Unknown
  Description of Unknown: RightRegion for integrase B10453 sequence
ttgtcggatttcacttccaatgcaccagctttccgccgtagctctcccgaatcagattgctgatgtctttggagtagttggtgcggctgtccaccatcgtcagaagaatcccttcaatcctcagtt

SEQ ID NO: 36453 - DNA, 61 bp, Unknown
  Description of Unknown: RightRegion for integrase B10454 sequence
ttcgatctaagcgtccaaggacgcatctcggggctgctgagtaattcaacagccccggatg

SEQ ID NO: 36454 - DNA, 260 bp, Unknown
  Description of Unknown: RightRegion for integrase B10455 sequence
ggtaaaaaatgttacagttatcaaagcaaatccgaggatgacggtaacggatgcgaaggttaataagaaacttcgtgttgctgcctactgccgagtatccacggagcaggaagaacagcttaacagttttgaaaatcaggtcagttattatacggcttatattaacagcaaagcagattatgaaatggccggtatctatgcggatgaaggtatatcgggtacttcaacaaaaagacgtaaggattttaaccgcatgattg

SEQ ID NO: 36455 - DNA, 260 bp, Unknown
  Description of Unknown: RightRegion for integrase B10456 sequence
ggaaactctaaacgaacacttttccacgtatgcgattatttcgtgctgcggatcgcagcgtaattacagcagcacattatcaggcggctctgtcctggtcggctcgacctccggcagcccggtagccagcgccagcaggaccgcggtcacggcaccgaacgcgccggcactcagcacgcccatccagttcacgtcccccagcaccatggcacccgtgccgatgtacgccagggcagcctccgcaaaggtgcggaccgcgc

SEQ ID NO: 36456 - DNA, 133 bp, Unknown
  Description of Unknown: RightRegion for integrase B10457 sequence
ctaaaattaaaaaatctggagatggtgggagtcgaacccacgtccattgtggataaaaactgatatctacgagtgtagttacttattatctcgggctggcatggaaggtaacctaacctaatccagtccaaag

SEQ ID NO: 36457 - DNA, 260 bp, Unknown
  Description of Unknown: RightRegion for integrase B10458 sequence
aaagaaaagccgttaaatgacttacaaataacggctagattcataaggaaaaagaaacgttaatttaattaaaaaatattaaattttgttattaacttctttccatgcagcatatgcttcatctgatgcaaatttcatattagcaatcatcattgtgagttcgtcacgtctctttatagccatatttaattccatccaatacataatcattgctctttcagaatttgtctcaataagcttaggtgtaatttcgtactttg

SEQ ID NO: 36458 - DNA, 260 bp, Unknown
  Description of Unknown: RightRegion for integrase B10459 sequence
atcagcggacataatggcaacggtttggcgctgccagataaaaacaactccgatatccaataaggataccggagttttttatttactgtgtttctttatttattgcagcagctctgtcccggctgccggaaagtttcaacttcctgctgtcgaacagtcgccactttcggggacgcttccattattttttctctgtcagccctgcgttcatactgccgctgcggaatccggccaaatcaacggtcacgtaataaaatcca

SEQ ID NO: 36459 - DNA, 260 bp, Unknown
  Description of Unknown: RightRegion for integrase B10460 sequence
aaagaaatattatggacaagaattggtaataacgaagaaattatagatatagaatggagataattttttactttaatagacatgacaccaatgacaagtttgttaaagtaaaatttaaaataatatttttataaaaaataaaagcatcttaagatgcttttatatcttttggtaaatatttttcatccagtttattatttttaattatttctaataatatttttatactatttcttattgcttcatctgatggttcattt

SEQ ID NO: 36460 - DNA, 260 bp, Unknown
  Description of Unknown: RightRegion for integrase B10461 sequence
gttggtagtaatgcttgtccaatcataagcagtgatcttcatctatgcttaactctggactgacaaggacaaggatcccaaactattggggatcctttttatttgcccatttttaaccaattacgtgttaaatggcggacaggctacgttatttgttcaactctattcaaatatcatttatcaaactgcaccacaaacacaacaaggaggtgacacaattggagatcaaagcaaaactcaggagaagtgacagagacatc

SEQ ID NO: 36461 - DNA, 260 bp, Unknown
  Description of Unknown: RightRegion for integrase B10462 sequence
gcctctcaccccgaccatcaatactcccgacatcttataatagagatgccgagagtcgcatagacagatgaagctagagattaagttctctagctttttttattttataaagtgaaggttatttatatactttcaaattcttcactacttacctctttgtcccaagcatcaccgaattcttttttcagtaatctaagtccagattcaagtagcgcttctaactcttctggtgacaccgtcaaccctttttcattcatcat

SEQ ID NO: 36462 - DNA, 260 bp, Unknown
  Description of Unknown: RightRegion for integrase B10463 sequence
gagaactgtgtattcgacaaggacagctacacccttgcgataacctatcgcattattttgtgacccattttataggctattggagtacggcggaccagacaacaatagcctataaaaaataatgccgcagtcagatgttgactgcggcattacctattcaatgttcagacataagcctgcttttcatagaacttggctttcccctggaacagattattcagatatgtggtcttgagccaggtggcgacctgagacttctg

SEQ ID NO: 36463 - DNA, 260 bp, Unknown
  Description of Unknown: RightRegion for integrase B10464 sequence
gttgataataccacagcaaggagcagtgttcctgatattagcatatccttacgctttttgtgagtgtttgaaatgatagtttttcaagatcatcacattaaacacacacaaaacaataattaacaggagtgatgtaattatgaatcctgaaaatgtaaagcaaaatataataatatgcgccatatctattgttatatggataatggttaatatatggctattaaaatagaaaaagccctgaccatatttctaatatcggg

SEQ ID NO: 36464 - DNA, 260 bp, Unknown
  Description of Unknown: RightRegion for integrase B10465 sequence
aaatcaacgcccggcgcgctcctctcgcttgacgtcttcccggttatcaatcggctaggctagtataatcaagtatcgccttattcataagactatatatgattaaactaaaaaagcccccggcaaatcgccgggagccttcttctatcgtcgcagcttgcgtatatactcatcatgaagccgcggatttattacccgaaccgcactgaaaagctcatcgatgatcggccatacatcttcttcccgcttcccgtggattg

SEQ ID NO: 36465 - DNA, 260 bp, Unknown
  Description of Unknown: RightRegion for integrase B10466 sequence
aagtcgtttgttgaatcggtgctggtgtatgaggatggaagcatggacattcgttttttgtagtctttgtcgtactaactatgcaccgcctgtcggtactgctttgttagtacaatcaatatattgtggttatccacacagtcatcctctatatgtggacaaaataaaagcaaggcggcgcattgtccgtcttgcttctcttttactccaaaattatcgacattattcttcgatgtattcaaccagcttcggatcgccgc

SEQ ID NO: 36466 - DNA, 61 bp, Unknown
  Description of Unknown: RightRegion for integrase B10467 sequence
tctcccgtcctgcttgtacaaatacagacgaactccgtcatccttctgtacggtgtccgga

SEQ ID NO: 36467 - DNA, 260 bp, Unknown
  Description of Unknown: RightRegion for integrase B10468 sequence
gatttgagcaatcttgctccaccagcggcaatgtgccgcagcaaactcgggactacgcgttagtgctgagttttttcttttttgcccgaaggcaatcccgtcttaccgccacaaatccgcgcggtaagactcttttgaatagaatcatcccacacagaaatgctttgtttctatgtgggactttgctttttgtgggggtgaaacgaggggatttgataaatttggagagatttaggaagtttggggacaggggttcggga

SEQ ID NO: 36468 - DNA, 260 bp, Unknown
  Description of Unknown: RightRegion for integrase B10469 sequence
ctggctaagtacgagcagtatgctcacgcttcgctcgccgacatgttcgggctgaccacttgaccacctggcggcgggactcattgagccagcgcgacgttccgctgcggatgttcgagatcgactaagggtatgcgctcatcattatctattcggttgtgatttttggcgagtctgctgtattaacgcatgactaaaattcccgtagcgaggcgacgcatggtgtcgccagttctggagccatctcatgccgagcatta

SEQ ID NO: 36469 - DNA, 260 bp, Unknown
  Description of Unknown: RightRegion for integrase B10470 sequence
aaagtgtcttcaatcgtgaattacaaaacaacagaactcgaattttctattgtattagtgtaggttcgctatcttacaatcagcaactcaaggcctcgaaaaagtcggttcgctatcttacaatgaaaaataatagattttggcaaaacccctcgaactgagcattagctaatcgaactcataatcaaaattaacaaaaaacgaccaatttaggtcgtttttgtttgttttttgctacttttcagcgagtaattaaagac

SEQ ID NO: 36470 - DNA, 260 bp, Unknown
  Description of Unknown: RightRegion for integrase B10471 sequence
gggcgccgaccggtgcctgtggaggagtcgatcgagatcgactttgtgggcctggtggtgtgaatggacagagacgccccagccagacggctggggcgtctctgtgtcctcatgccctgcgtcgggcgaggcacttcgggatgatgcccgggtgggcgagcgcggaggcgaggggtccgagtacgccgacggggtcgcgtcgggcctgttcgagggtgcagtcgaggccgaacccgatgatgagcatggccagcgcctcg

SEQ ID NO: 36471 - DNA, 260 bp, Unknown
  Description of Unknown: RightRegion for integrase B10472 sequence
aaggacaatgcaacctttgagatcaggttcttggacggaacagctttcagcattcagttttgattgaatctcatgttgcacagaatgcttgaggctcgatgaaaaggcgccctacaatgggcgcttttcctcatataagggctggcgggtgccgcaataatatgatataataattgaccaacgattaacccttatattgagacgttagtacggaactattctatgaacctcccacgttaactgcgcgatacaagctttgg

SEQ ID NO: 36472 - DNA, 62 bp, Unknown
  Description of Unknown: RightRegion for integrase B10473 sequence
ggttcgcattttagcatattggtgggcccacctgggatcgaaccagggaccgaccggttatg

SEQ ID NO: 36473 - DNA, 59 bp, Unknown
  Description of Unknown: RightRegion for integrase B10474 sequence
gatagctcctcagcggattgtgctccctctgcgctggggacgctggaatatcagcggac

SEQ ID NO: 36474 - DNA, 260 bp, Unknown
  Description of Unknown: RightRegion for integrase B10475 sequence
gacctattaatcgacaaaattttggtttttcaagaccatatcgaaatcgtgtggcgcgtgtaaagttgtacgctccgcttctccgaaccgtacaaaatgaaacggctggtggtagcttttgcctataaatagacacttgaagaagtcacgagtgattatttatagacaaaaaaatagggtgcataccaagtcaattagacctaatatgcaccctataattattttttggtgaatatcttctttatcttctgccataaact

SEQ ID NO: 36475 - DNA, 260 bp, Unknown
  Description of Unknown: RightRegion for integrase B10476 sequence
gacaaagaaaagccgttagatgacttgcaaataacgattagattcataaggaaaaagaaataatataattatttatacaatgtataaattagggattattaagaaaataattcctattttttgtacttttcgtttttagaagtactattattaactatattaaatataaaaatataaaatttgaaactatgagaagaaaacaaaacaacaacttagtagcaattagatacaatgatggagatatgttatattttacttct

SEQ ID NO: 36476 - DNA, 60 bp, Unknown
  Description of Unknown: RightRegion for integrase B10477 sequence
aaaataaagcttgctccgcccttgctattgctctatgttcctctccccgcgggcatattt

SEQ ID NO: 36477 - DNA, 126 bp, Unknown
  Description of Unknown: RightRegion for integrase B10478 sequence
ctcgaaaaccccgcagtcaaaatgctgcggggttcgagtgaagattgtttggtgacccggtagggattcgaaccctagacctactgattcgtagtcagtcactctatccagctgagctaccgagtc

SEQ ID NO: 36478 - DNA, 260 bp, Unknown
  Description of Unknown: RightRegion for integrase B10479 sequence
aacaccttattttttgtgaaacactgtttcggatttgttttgattatagaggaagtaagttaggagcttgcttcctctttttctttttgtgccagcttcaactccaatacagcggactcaatgaggttttcaatttcagacgcattgagagtgtagcctttactgtgcaagaagtccaaaacgtactgcttcttctcctcacctctgccgacaccagcgtaaatcatttcagccgcttcgactgcaatgtttacccacat

SEQ ID NO: 36479 - DNA, 260 bp, Unknown; identical to SEQ ID NO: 36390
  Description of Unknown: RightRegion for integrase B10480 sequence

SEQ ID NO: 36480 - DNA, 260 bp, Unknown
  Description of Unknown: RightRegion for integrase B10481 sequence
gcgcccctccgctatcagtcgctggcacccatgttcggcaaccctttagcggagaggatatgagtgcgcccacttttggcgttgcagcactttatgtgcgcgcatccacggaacaccagaactactcgacgggccaccaagagtccgcgctgcgtgaatatgcgacccagcacgatcttgaggttgtagctgtgtaccgcgacgaggggcgcagtggactgacccttgatgggcgtagggggctactggcattgctgaac

SEQ ID NO: 36481 - DNA, 260 bp, Unknown
  Description of Unknown: RightRegion for integrase B10482 sequence
acgctgtggaactaccagcagttcgcctactcctcaatcagccagttgtttggagtgtcatgacgacctatcaggtttgatggttttctctgaaggaggccggagctaggatttcagacatatggatctctggaggaaatcatgctcaacatcatccagcgtcgtgagtcccagcagattgaggaaggtcgcagcttgggcgaaaatgcttcgatcgagcctctcatagagcgatgccgctactcgggattcataattca

SEQ ID NO: 36482 - DNA, 172 bp, Unknown
  Description of Unknown: RightRegion for integrase B10483 sequence
gaaaacagttctggcaaacccggcccttccgagtttgccagaacgtcgattggtggaggataggggagttgaacccctggcctctagaatgccattctagcgctctcccaactgagctaatcccccgacgcattacaatatagcaccgtttgcgcaggacgtcaatccgcag

SEQ ID NO: 36483 - DNA, 204 bp, Unknown
  Description of Unknown: RightRegion for integrase B10484 sequence
aagccgcatagaaaggaatatggaaaaccggaagagctggaaatacgggtcaatctgaaatagtagcaggaacatggacaatcagatccaaaaagaaatcactttatgcatatccgcatatgcatcccctgtaaatccctgtggatcgtttctttgtccgtcaatcagtcggcagacatagtagaaccctcgatgatacaggac

SEQ ID NO: 36484 - DNA, 180 bp, Unknown
  Description of Unknown: RightRegion for integrase B10485 sequence
ggttcgcatttcaaagtattggtgggcccacctgggttcgaaccagggaccgaccggttatgagccggttgctctacccctgagctataggcccacagttagtttctagcttattaattataccgaataggctagtactaagtcaaggtacaccgtatttgggttataggacaaaaagtg

SEQ ID NO: 36485 - DNA, 260 bp, Unknown
  Description of Unknown: RightRegion for integrase B10486 sequence
tccccaagggaattcggccaaatccccaggttacacgcctggcggcagctaaagatcgcctgaaagccatcccgaaaagaagaaaccccgccgaagcggggcttccatttggtgccggtacgggagtttagaccctgcccgcattatgcccccgtccacgggggccagtcaacaggcccgcttttgctccacgaaaatagtgcttgacaactatatacgcatagcgtatagtgcgaattgtagggggtgggcaggtgccg

SEQ ID NO: 36486 - DNA, 260 bp, Unknown
  Description of Unknown: RightRegion for integrase B10487 sequence
attgaattctacgcagaaccaaaaggcaaagattttcgtattaagctgtatccaaaaatataggaagtcagcgcaagcactggcttcctataaagtgtcatcttgtataccccttattcatgagggtagtacatcataacacttcctttcgctttatagcatatcacattatagacaatttattctttttggtcaagaagaaaggcagatgcatcatagcacctgcctcttttttaattcaataaacattcccatgttgc

SEQ ID NO: 36487 - DNA, 62 bp, Unknown
  Description of Unknown: RightRegion for integrase B10488 sequence
agggtttataaggataggtcaactgaggtatatctacgtgagaatccgctggccatgccata

SEQ ID NO: 36488 - DNA, 260 bp, Unknown
  Description of Unknown: RightRegion for integrase B10489 sequence
gagacagaggtccgcgacaagtggcaccctgttccgttttttctcgatatttcgctgatttgatttttcacaggtatcatatatatcattgatgcgcgtattcctctgcacaataatgatatatatgttttcaacattaaagaaagagctccccgaagggagctcaagctttcctaatatattctatcgccttcacagcatttccctgctgaagatgagagatcatgctgctcttgatctgccagacgtctgcatctaag

SEQ ID NO: 36489 - DNA, 260 bp, Unknown
  Description of Unknown: RightRegion for integrase B10490 sequence
gaaacagacatccgcgacaaatggcatcaagtgccgttctccctcgatatttcgctgatttgattatttttgtctctcatatatatcagtgatgcgctgaggaatacgcgcattaatgatatagcaaataaatagagagaaaaaactcccccgcagaatgaatctgcgggggagttttttctattggaatgcccttatataataacacagtttccaaaagacagaagtaaaagtcgaggttcacctttcttcttaagtta

SEQ ID NO: 36490 - DNA, 62 bp, Unknown
  Description of Unknown: RightRegion for integrase B10491 sequence
aagagacacttcacggtccggttcctggacgggaaggtcaaggaaatagttgtagcagaata

SEQ ID NO: 36491 - DNA, 62 bp, Unknown
  Description of Unknown: RightRegion for integrase B10492 sequence
aagagacacttcacggtccggttcctggacgggacggtcaaggaaatagttgtagcagaata

SEQ ID NO: 36492 - DNA, 260 bp, Unknown; identical to SEQ ID NO: 36165
  Description of Unknown: RightRegion for integrase B10493 sequence

SEQ ID NO: 36493 - DNA, 260 bp, Unknown
  Description of Unknown: RightRegion for integrase B10494 sequence
cccaggctgcacggtattttacctgtccctagcgaagtgtacgctgtgtcgcaacccttgtgaaagaaggtaggcctggtgataaatccacctctacttccactacggctccctccagacccacaacagcagcactttttactttggctagcatcttgataaaattcttttgtctaagtaagactcagccttcttcccttagaaaatcctcaatttttttaattagttctccattctcttcctcagatagcataaggttg

SEQ ID NO: 36494 - DNA, 260 bp, Unknown
  Description of Unknown: RightRegion for integrase B10495 sequence
cgaagcgcggacaaaaacccacgccgcctgctaagtctggacgtattcccgcgattgtattagcatgtatcgcacgttctaacatggtatatatgctaataccataaaattgttaagattctgatttcctcttgattctgtacagcttttgatgtacaattatatcaggtcaagggagaaacacaagggaggacgaaatcatgaaagacgttagaacgatggccgacaacgaactgtttgaccgccgtaacgagcttcat

SEQ ID NO: 36495 - DNA, 260 bp, Unknown; identical to SEQ ID NO: 36488
  Description of Unknown: RightRegion for integrase B10496 sequence

SEQ ID NO: 36496 - DNA, 260 bp, Unknown
  Description of Unknown: RightRegion for integrase B10497 sequence
taccgtaagcatgaatcgggtagtgatatagaacctgaattaaactttaaactcttaatttaatccgtctgcaagcatcgtgtattcgatttatcggaaactcaatgcttacagacgaaataatatggcggatagtcgaatggctacccgccttttattgtggtcagcttacccgcttccacatgaaaacagccaaatatggcggcatattattgtgagccttgccgccacctgcatacatcgtctgcacgttgccgcca

SEQ ID NO: 36497 - DNA, 260 bp, Unknown
  Description of Unknown: RightRegion for integrase B10498 sequence
ggaacctccccacaatccctccttaccctggatatattcccgcgtattggttacaacgtgtagattagcactggttgtaatgcacacgatgtaactaaaaagccctcccgaaggagggctttgttcatgttctgagcttgcgcatcacaccgtcgtaaagccggggctgtatcacctgcagtgtggacatcaactcgtccatgatgggccagatgtccgccgccttcctgccgtcaatcacccgggagaattccgtgtcg

SEQ ID NO: 36498 - DNA, 260 bp, Unknown
  Description of Unknown: RightRegion for integrase B10499 sequence
gacgctctcattgaaactattcatgtcgggcatgggaatgtgcaaattaaatggaagatttaatcatggtatgctgattgattagccttagcgattccatcagagtacaacgattttttcattcgtctcaaactaatcatttgggacgaaatacatatatcaagatgttaatttataagagcactgtaaaagtacaatgatgttataagcgaacatcttaaatgaataaaagaacaagggcgggtgtggatacatttcca

SEQ ID NO: 36499 - DNA, 60 bp, Unknown
  Description of Unknown: RightRegion for integrase B10500 sequence
aatcctgtcaagataaagagttcttatttgaacaatgtggtgatccacccgggattcgaa

SEQ ID NO: 36500 - DNA, 260 bp, Unknown
  Description of Unknown: RightRegion for integrase B10501 sequence
cggttgcccggcggcgggtacatcgaccagcgccgcctggtgatcgactggaagcggggataggccccccgttggtcagggtcggttcacgcaggaacgccccccagggtctcttggggggcgtttccgcgtgtcgactacttcttcctcggcttcaccgcgaaggcctcttcccggtgctgggggcagtagtccagccgcttgtccttctccccgtagaacgcaggcttgcgctcccggacggtggcgtccgggtcgat

SEQ ID NO: 36501 - DNA, 222 bp, Unknown; identical to SEQ ID NO: 35666
  Description of Unknown: RightRegion for integrase B10502 sequence

SEQ ID NO: 36502 - DNA, 260 bp, Unknown
  Description of Unknown: RightRegion for integrase B10503 sequence
cttaatgatgacactgaactacattactttgttaaacgctttactcccaaaagacccaaataagcagttgttattaattaattgttgttattaattgttgtgttgtttattgttatgtttaagttaatgtaatgtaagtttatttattcattagtgtgcacttattaattttgttttacatttaaaaagctgtctccgaagaggcagctttagaaaggattgtgaatcggatcaatgactcacaatcttattttaagaga

SEQ ID NO: 36503 - DNA, 59 bp, Unknown
  Description of Unknown: RightRegion for integrase B10504 sequence
attgaagaggctttgagttcggatttgacacacgacagaccaccagaaacaaaaagcac

SEQ ID NO: 36504 - DNA, 60 bp, Unknown
  Description of Unknown: RightRegion for integrase B10505 sequence
gagatgtatcgcttgttcatcgaaagaatagacgtttatccggaagaacaagatagcggg

SEQ ID NO: 36505 - DNA, 260 bp, Unknown
  Description of Unknown: RightRegion for integrase B10506 sequence
tactcgaacacttccatcccgttgatattgccgccttttattataatttacatagacctataaatcaagaaaaagcccgccagcataaagctgacgggcttctctttattcttccatgttttcgcctgctctgtggatcgcaatcgctccggctattgctccaccgatcagaggagcggccaaaactatcacaagaacggcgacggccatcatgagacgtacaccttgccctgataatacgcagcgatccagccggaagg

SEQ ID NO: 36506 - DNA, 260 bp, Unknown
  Description of Unknown: RightRegion for integrase B10507 sequence
ttaaaaaggcttttaacacccaaaaagtttctaaatgactcctggccatctaaaagaaagtagcttctctttatatgttgttgctatgtgatgtaactattttgtattttttgctctattttttttagtttttccgctcttattttcttattttttaattcgcattgccaaacaacaataactttccaaccaagatttttcaactcatgttgattttttttatctcgcacaatgtttgaatctatcttattttgccaaaa

SEQ ID NO: 36507 - DNA, 260 bp, Unknown
  Description of Unknown: RightRegion for integrase B10508 sequence
gtcgtcgaccgtgacggctccctggtccgcggcgagctgatttattactccccaccgccttgactgcctgtgtcatcatcccccgtccccctgggggcacctcccgctagacacagctttacccacctttttgtcgcacacattcgcccgtggaagaagaaaagcccctgagttcaggggctttcgtcctccatctgttctctgacgaccatccgcgtcagcaggatcgaaggcctgcgcttggggtctttcagccccag

SEQ ID NO: 36508 - DNA, 260 bp, Unknown
  Description of Unknown: RightRegion for integrase B10509 sequence
attaaaaagattagtataatggaaaccgatattaaaattgattggcataaagaagtgctctagtcttttttatattgtttgttttactcttgtgactatacaggattaatcccatatataagtaaaacaagtaacacagccatttatatgatataatagtattgggtgatacatatgaataatatatttaagaaattaatccattgttcttgcgggaagatatttaatttcaaatcagaaaatggtactccaatatatct

SEQ ID NO: 36509 - DNA, 260 bp, Unknown
  Description of Unknown: RightRegion for integrase B10510 sequence
cttgaaagttcgcttttaaatgatttggtgacccagaagggattcgaacccctggccttttgattcgtagtcaaacgctctatccagctgagctactgagtcatgtacaaggtactcacttatattaacataatgattgcggctacgcaagcattttttaatattttttgagtaattttatggacatgcggcccgaagaccgccatccaaattttggcaggggcagtaggacttgaacccacaaccaacggttttggaga

SEQ ID NO: 36510 - DNA, 260 bp, Unknown
  Description of Unknown: RightRegion for integrase B10511 sequence
ggtactcgaaccccgaagatcatcgtgctgcgggactatgtcgtcctcagaattgccgtataaagcaaaagagccccggcgggtgccggggctctcttagtctatcatgtatttgctggctgttgtgacagcgcagcaggctcccaggaatatgagagccgccacgctgatcagggcgatcatgccacgcccaggatcttcttggtcctgttcagaacgtcagcgggatccaggccggagcccttcaccttgccggcgat

SEQ ID NO: 36511 - DNA, 260 bp, Unknown
  Description of Unknown: RightRegion for integrase B10512 sequence
caggtacgcgatagctggccacctgagctaattcagcgggttacgttgaagcggatcgcgtaaatgcggccgaaaggcggcttggtcgttataaacggcgccgaaggatggcaccccccataatcgtcgcagattccaaatccggacgatatcggctggtggtcatacgttcgcggaagcgtgagttacccgacatcccgggctacgaagatgccgccgccgagtcgtcgccgaatagcctcaccgctgccaaaacctga

SEQ ID NO: 36512 - DNA, 260 bp, Unknown
  Description of Unknown: RightRegion for integrase B10513 sequence
ggtactcgaaccccgaagatcatcgtgctgcgggactatgtcgtcctcagaattgccgtataaagcaaaagagccccggcgggtgccggggctctcttagtctgtcatgtatttgctggctgttgtgaccgcgcagcaggctcccaggaatacgagagccgccacgctgatcagggcgatcatgccacgcccaggatcttcttggtcctgttcagaacgtcagcaggatccaggccggagcccttcaccctgccggcgat

SEQ ID NO: 36513 - DNA, 260 bp, Unknown
  Description of Unknown: RightRegion for integrase B10514 sequence
ttgtataacaaagagaaaaagaggtttgcacaatttactttggaagtgaaatttaagatatagttacaggtatcgtggtacagattattgtttatccgtacgatgatacctgtaaaattacctctaagaaatatattattactataattatacaataaaaggctaaggaaaataacttccctagccttattttacactataaataacatagcacataatacaccaataccaaagtatgctatacgccctgccacttctaa

SEQ ID NO: 36514 - DNA, 260 bp, Unknown
  Description of Unknown: RightRegion for integrase B10515 sequence
ggtactcgaaccccgaaaatcatcgtgctgcgggactatgtcgtcctcagaattgccgtataaagcaaaagaaccccggcgggtgccggggttcttttgctttatcatgtatttgctggcagcgccatcatgccacgcccaggatcttctcgaccctgttcagaacgtcagcaggatccaggccagagcccttcaccttgccggcgatctcctgcgccagcacgtcagcaggatccggctcggccggcttcgctgcgacg

SEQ ID NO: 36515 - DNA, 260 bp, Unknown
  Description of Unknown: RightRegion for integrase B10516 sequence
gcctgtcacacatacagtggagatgaaccgacacattacatagaacacacgattgaccgataaaaaaacctcggatggcctccggggtttttcttttttattacttttcttctttatcttcctgcttttcggcttttgcctcctggacgtcgccctttgcccgcattacttccagcaatttcagcaggatcttcggtacaggcacgcccattgtcgccacattttccaggatgctcagcccttcggatgcaataaaccat

SEQ ID NO: 36516 - DNA, 260 bp, Unknown
  Description of Unknown: RightRegion for integrase B10517 sequence
gcaggctccagaaccaaatgggatactaccccgttcaatctggagatatctttcaacttctgacatacatcataaatgggctaacgattctgcccaattatgatatatacagcaaaaactccccgaagcacggcgctccggggagtatttttttcaatctataagcccactgaactcgtggtcgtcgatcagtacgtcatcgaggtatactttcagccggtgctgcttttctgctgcgacagtctcaccggggaacttcg

SEQ ID NO: 36517 - DNA, 260 bp, Unknown
  Description of Unknown: RightRegion for integrase B10518 sequence
tattcgaacatacaggggccttgtgttgccacaaattttatcattctgcgtgtcgctgtgtaaataatgactttctgatggcgatataatcggtgcagctttcacggacgccatacgcgtctggtccggggtctttgatctagtcagtcctgcatatattctgctgctatagctattgctataacagcgctggcaactatggtaagaatgattacggtgaagataatagtcaaggccattgataacctcctattaattaa

SEQ ID NO: 36518 - DNA, 260 bp, Unknown
  Description of Unknown: RightRegion for integrase B10519 sequence
gccggcgctccacgttggttcgacccgaaccgggtcgagattgtgccgcgtaagccttcctgatccgttcgacttggagcgggccgggtgggttcttttggccctggacacggaaccgttcgcaggcttcgtcaatcgtttcgctcatgccgcgcatcgtggattaccacgctgcgtgatcgcaagatggacatgtcgcggtcttcttcgcccctcacctggatcggtatcaccccaggtggggggcttttttctgtgcc

SEQ ID NO: 36519 - DNA, 260 bp, Unknown
  Description of Unknown: RightRegion for integrase B10520 sequence
tactcgaacaccgacgagcctctaatcattccaccgtttattataatatatgcagcattatgaagcaattaaaaagagcccaccagcgagatgctgatgggcttcttcttatttctccatgtattcgccggcgagcatgacggccaaagggcctgcagacaagaccacactcaggccgccgaaggccagcaggacgatgaacaggatcaagcgacgtacacctggcccttatagtaggcagcgatccatccggaagggca

SEQ ID NO: 36520 - DNA, 260 bp, Unknown
  Description of Unknown: RightRegion for integrase B10521 sequence
cagtcgaacacccccgagctgagaataaaccacgggtttctcctcgtcaaattccacttatgagcaaatcatcagcttgatgcgtacgtatgtacgtactcaattccgcgccataagatcgactcatcgaatgattgagtcagtacttgaaaggagcctaccatggcaaccaccatcacaacgaacgagatgatcttccgcaccctcaagaccaaggtcgtcaactacaagggcgagcgcaaccccgagccgaaatacgc

SEQ ID NO: 36521 - DNA, 260 bp, Unknown
  Description of Unknown: RightRegion for integrase B10522 sequence
agctcaatagtatggaagaggacaatatgggatgaagtgagggtgactgtaaattttctttaaggggatagaccaataacgaccatatgtggaattatatacgtactgttgaatagtgtgatgcatcacactttatttagtacattattaaaaacacattgggtctatcccctcataaacattgatatataaaggttttaaagctataatagcattatcaaaagttatccacaatgtccaatttaacatgaatttaactg

SEQ ID NO: 36522 - DNA, 260 bp, Unknown
  Description of Unknown: RightRegion for integrase B10523 sequence
ggccggatgccggacggcgggtacttcgactacgaggcgatcgaaacccggtggaagcggtaaggatgcttcgggaaacgctcaattatcttgggggcgaggctgcttttccgcttcttcttccgtgaatgaacgatcgacacctgggactggccctggctcgccagtaacagtcacctcgctctgcgagatcgattgccccaagagccgcgtcaaggtattcacctgctgcctaagttcatttacttctctggtcacct

SEQ ID NO: 36523 - DNA, 260 bp, Unknown
  Description of Unknown: RightRegion for integrase B10524 sequence
gatcatccgccccgtattcatatcgtttggcgcgattcgcctagcaataacgaggaatcgtaggctgaatcagatcattcggcgtacccaccaatacaaaacagcctaagcggtcgcgtggattgcacacgaaaacgttgacaagtcgcgtactttgctatacaatatgcgtactgagatacgtgttctatctcatagattgcccccgcaatgcatcaccatcgcgagggcgagcaaccaaaggagttagccctatggtc

SEQ ID NO: 36524 - DNA, 260 bp, Unknown
  Description of Unknown: RightRegion for integrase B10525 sequence
ttgcaacgggcgggcgttcgctgctgggtcgaggatggcgaggtcgtcaagatcgagccgtgaaaactggccgaattggggtattgacaaatggaataaagtatgataatattaggccatcaagaaggatggggggggggctaacggaaatggacaaggaaagggcgcaaaaagaaatcgagcgcatttttgaacagtgctcgggcttcgaactggcattcgaggactggacgggcaccggcgaggatgatttgtgcgtg

SEQ ID NO: 36525 - DNA, 260 bp, Unknown
  Description of Unknown: RightRegion for integrase B10526 sequence
agggaagcatcaggcaaaggtaagacattaccgttccggattaccgaggttaatttcaactaatcatttactttttactacgaatgggaacccttatgtagtaaatagtacattatagatacatatgcacagcctgtggataagagagcaccttaaaggatgccctcacctttcatgaactcgttaaccttgagcaagtacttctgtgccagctcattatatttcgtgctgcctgttgccgttttataaagatcgtcaat

SEQ ID NO: 36526 - DNA, 90 bp, Unknown
  Description of Unknown: RightRegion for integrase B10527 sequence
gacacgaagtcggaggcgatccgtcagtgttcggatttgaacacgcaagcgtccgcgaggtgactcgaacacccgacctaccgcttagga

SEQ ID NO: 36527 - DNA, 260 bp, Unknown
  Description of Unknown: RightRegion for integrase B10528 sequence
gtgtggagggattgggtgctcgacacgccgcgtgtccccccaaaaggggacagccccaagtagcggacaggaccggacaacgtattgcccgagcgcaacgctgaggtctatgaatgacaggtggcaattgccacctaacgggaggactgctgatgaccgattaccgaaacccgcacccgctggcggtggcgttacagcattttttcggtgatcggctggagcggaagggactcatcgtgtgctccgtcgcgggcgagtcc

SEQ ID NO: 36528 - DNA, 260 bp, Unknown
  Description of Unknown: RightRegion for integrase B10529 sequence
gtccaatatattacttttaaaaacggactcactcatcattttgagtataaagaaaatcaataaaaaaacgcaaaaatacccatgtggtctattcttacagccacatgggttttaccatatcatatttacttatacatacggacaacctagagtataaaaactgactgttttcttcatttaaagttcattccttacaatatatttaggttttattttgtctcctatagacattacatttcttacgaaatcaattacttgtc

SEQ ID NO: 36529 - DNA, 260 bp, Unknown
  Description of Unknown: RightRegion for integrase B10530 sequence
tcacatattgaaaaagttataattactgacgaaaaaatacaaataaaattcaaacaaatatagtttacttctatgacgcttacttcatataaggacgtagaagtaaactactaggtgtataatttatttttaaatttaaactagatatagtataacacaataaaatcgtaaaaaatagggataaagcaatttaacagtttgataactgttcactttatccctataatactatatttacctatctaaaagttctggatttg

SEQ ID NO: 36530 - DNA, 61 bp, Unknown; identical to SEQ ID NO: 36214
  Description of Unknown: RightRegion for integrase B10531 sequence

SEQ ID NO: 36531 - DNA, 260 bp, Unknown
  Description of Unknown: RightRegion for integrase B10532 sequence
gatgctttgatagataagataatggttagtgatgaaagtgtggagataaattggaagatatagtttgtggcacattgactacatcgttcaatcattatagtcaatgtaccataagcgaaagaaggtcgctaataagccatttggcaaggcttttatatacttattttaatttataaattgactattttgtagcttaaaataaatatataaacgcaaaaaattaaggttataagcttttaaacttataacctcatttttta

SEQ ID NO: 36532 - DNA, 260 bp, Unknown
  Description of Unknown: RightRegion for integrase B10533 sequence
aaggcgatgattgaaaagatcttagtagcgtcagacgagatagatattcagtggaaattttagtttactttcgtgtccagtgttgatacattgcatataaaagtaaactgccctgtaacccttgtggttatggggttttaattttggcgtaaaataggcgaaaagaaaaagggctacctttcggtaacccttattgcattaagctcagcaagatgtctctaggacttgttggtgcttgaggttgaatagcagtcggtgtg

SEQ ID NO: 36533 - DNA, 260 bp, Unknown
  Description of Unknown: RightRegion for integrase B10534 sequence
ttcggggcaaagaagtatgagtttgcatttctggaaggcagcagggtaaaggtttccgtatgatcattcggaaacctcatcatcattcagaccgaataagtcaagctggctgctctggggcatctcatcatcattttcttcttctgactccggctcatccgttttcttttgtggcagcttatgtgtgtagagcttatcccacggaagcggattacggcattttttgttatagccgataaggagtgcctctgcaaatccaa

SEQ ID NO: 36534 - DNA, 260 bp, Unknown
  Description of Unknown: RightRegion for integrase B10535 sequence
aatgaactgattgaaaaaatcatcattgatgatggggatgtcttaattcattggaatttctagcttttcaggctagtttccaatgaaaaaaatttataatattttcgttacaagtcctttgcatggttttaaccatccttgtgacttgtaacggatttcagaaaggaagccgatacaaatgaagatcagaatcgaagatgggaaaacaattatttcaacaggtgtcaaagcggatgccatcaaaaacaaaacaggtgtgc

SEQ ID NO: 36535 - DNA, 260 bp, Unknown
  Description of Unknown: RightRegion for integrase B10536 sequence
gtggttaaaaaggcctatatttcggtgaatgacgtcaaagttgaaacaattgatctggtttaataccgtgaatgccgatacatcgtattttacagtgataaacccgtttacaacgcaaaaacggcggacgagcacacagcccgtccgcctttctcattaaaaatgcacgttttttatgacgtgttcgctagtttaggtataactacgcaaaaaacagcgtatttattttactctcgctcgcgtaaattgaattaagatta

SEQ ID NO: 36536 - DNA, 62 bp, Unknown
  Description of Unknown: RightRegion for integrase B10537 sequence
gaaaccagcatccgtgataaatggcacccagtaccattttctatcgagatttccttgatttg

SEQ ID NO: 36537 - DNA, 260 bp, Unknown
  Description of Unknown: RightRegion for integrase B10538 sequence
gataagaatggcaagaagcgttacagttataccagcaagaaaccgtcaggcatcggggcatagggcagtaccgcagaagaagataagggttgcagcctactgccgtgtatcaacggatcaggaagaccagctccacagttttgaagctcaggtcgattattatacgaagtacatcaatgaccatgaaaattatgaaatggccggcatctatgcggatgagggtatttcaggaaccaatacgaagaagagggagcagttca

SEQ ID NO: 36538 - DNA, 260 bp, Unknown
  Description of Unknown: RightRegion for integrase B10539 sequence
aattatataaaaatacagttaaatgcgagtataagcacaatacaaaattttaatgaattataacgtttcggtcgtactgcaaagactaatattgagtttagattggctgcccttcgttgcctccagggttgtgggctaattccgattctttcattggatgcgctcaacgaaaatattaacggatactaaattaatagtatccgttttttatttatatttttttgactttttgcctgaaaacaaaatcgcctatttgaaac

SEQ ID NO: 36539 - DNA, 260 bp, Unknown
  Description of Unknown: RightRegion for integrase B10540 sequence
atcgaacgtatcgaatttcttcgggtcggtgatgaaacggatataaatgtcgtatataaatagggacgcccgaagaaatcggacgcccttttcttttgcaatcgtttatgtaccggcgtttgtagccacccgctttcgtgaacattctttgaaacaaatgtccgtcaacgcgtgttcgtataagcaaacaaaaaacgcaaccccgatcgttgggattacgcttctttttttataagcttacgaatactttgacattcgga

SEQ ID NO: 36540 - DNA, 260 bp, Unknown
  Description of Unknown: RightRegion for integrase B10541 sequence
tgtgtacgtgagcgaacacagtttggaatcgtcacggaaataagaaaaggagctgttgcttagctcctttttcatttgtactcctttgctgtatcgtacacatctgcatcacaccatccgtctgctcctgtccactggtcaaacggctgactgcctctgcgtctctggatcaatgcacagcttatcagactcacgctgaatgccttgcagtccttttcacgctcatacttggtcaatctctgccactgcttctcagcatc

SEQ ID NO: 36541 - DNA, 61 bp, Unknown
  Description of Unknown: RightRegion for integrase B10542 sequence
accgacaatataaacgaacttgatctagaaataacatacagggttttcaatggcggaggcg

SEQ ID NO: 36542 - DNA, 260 bp, Unknown; identical to SEQ ID NO: 35603
  Description of Unknown: RightRegion for integrase B10543 sequence

SEQ ID NO: 36543 - DNA, 59 bp, Unknown
  Description of Unknown: RightRegion for integrase B10544 sequence
gacaaagccttgagcggtgcggcctccgggtgttcggataacgcttgccaagctccacc

SEQ ID NO: 36544 - DNA, 260 bp, Unknown
  Description of Unknown: RightRegion for integrase B10545 sequence
tataaaaagactgaatcaggtgcagcaatagaaccggaacttgaaatcagtctcaaaatataatctttccaccatcatgaggggatgcatttatgcacccctccatgattccagagacataattgaggcggatagctcaagtgctaccggcctttttgctatgcagtgcgtttccacatgtacacggccagatatggcggcatgttgtcgtgcgccttgttcccgccagcgtacagcgtgttgacgttgccgctgtagcc

SEQ ID NO: 36545 - DNA, 260 bp, Unknown
  Description of Unknown: RightRegion for integrase B10546 sequence
tcagatgtaaaaagcaacgggttcggatttggcgtgttagagtccaccaagaaaaagagataattttacttacagtaaaattatctcttttttattcttacttgataactccgcaggcgattttggttccggcattgccggagggttgtgtagtgaaatcgtctctatccgaatggataatcaccgttttgccgataagctcttttaccgtaaaacggttggaaagaactgccgaaaaggcataattcccacatccaagc

SEQ ID NO: 36546 - DNA, 178 bp, Unknown
  Description of Unknown: RightRegion for integrase B10547 sequence
tctatcatcgtggacgacaaaaagcaggtgaaaatcaatctaaaaataacgggcaatttgtaaagaggagctgctttgcatacctacttggtgtagaccgtagatgtcatcgacaccaaataggagtccacgccccacgcacacgctgcaaaataacacagccaacacgcacatttgg

SEQ ID NO: 36547 - DNA, 260 bp, Unknown
  Description of Unknown: RightRegion for integrase B10548 sequence
ctctcaaacatcgagggcggtgagttcgacgagggactcgtcagctccatgcagaagccttgatttttcaaggctttttttagttgaattttgaaaggtacgcaaagggtactcaaatatgcagaaaaggagaatttgaatctgttgcatacaaaaaatgaagtccacaaatggggcgcagtttagagcctgtttgtggactttttttgctatttttccgttctttttctaaaatcaaggggaataaaatcgaggaggcg

SEQ ID NO: 36548 - DNA, 260 bp, Unknown
  Description of Unknown: RightRegion for integrase B10549 sequence
accacaccattatacgcaaaagggcacatcatagtgatactgcctttgagtattaccgtctgattttcagacggtattttctttcaaaataaaaaagccgcccggaatcccggacggcttctttcattttattcgcttatagatatagagatagaataaattatcgacggtgttgcctatcagagcgaggacgaagagaacgtcaaggtttgttccgagaaccgcagcgatgatcgttccggcgatagtagctatggcat

SEQ ID NO: 36549 - DNA, 260 bp, Unknown; identical to SEQ ID NO: 36468
  Description of Unknown: RightRegion for integrase B10550 sequence

SEQ ID NO: 36550 - DNA, 60 bp, Unknown
  Description of Unknown: RightRegion for integrase B10551 sequence
actttatctgacataaataagtgttcggatattgagggtttcgctcgacgaaaacgaaga

SEQ ID NO: 36551 - DNA, 260 bp, Unknown
  Description of Unknown: RightRegion for integrase B10552 sequence
cagtgtgtacgtgaacgaacacagtttggaatcgtcacggaaataagaaaaggagcttgttagctcctttttcatttgtactgcttcgctgtatcgtacacatcagcatcacaccaaccatcagctccgcaccactggtcaaacggctgacttcctctgcgtctctggatcaatgcacagcttatcagagccaccgagaagctcttgcagtcacgctccttttcgtacttggtcagtctgctccactgcttctcagcatc

SEQ ID NO: 36552 - DNA, 260 bp, Unknown
  Description of Unknown: RightRegion for integrase B10553 sequence
gtcaccaaggctccgggcaagttcaatcccgattggctaagccccatcccccctaacgactaggcccaacctccgggctatccgttgccattgccttgcgctcaacggtgggaggccggcaacggtagcccgggccttggcaagctcatccgggcctagctccgggtagtggaggaacaaccgcctagcgtcttcgttgctcagtagctccatcacccctcccgggtaatgttccacgagagccccctgtatggccttct

SEQ ID NO: 36553 - DNA, 260 bp, Unknown
  Description of Unknown: RightRegion for integrase B10554 sequence
ggcggaagagtggacagaggcattgaccacagccggctgacacccatcttcaaggagcaatagaaatggccccctccctttcgggagggggccttcttctgtctcagcaactagcgtcgcacgcagtgcgcagcgactacttcttaatcttcacgccaaactgagcaagagccttgttgagaacgacctccgggagagtaggagcctgctgggagtactgcttgatccactcctcttggctcactcgtcctcctcatcct

SEQ ID NO: 36554 - DNA, 260 bp, Unknown
  Description of Unknown: RightRegion for integrase B10555 sequence
tcctccagcattgccaaaaccaaacggcttaaactgaagtggtccaaacgccaggctgaataatccggctaaccaccatcggcggcgagacaggccgcctggcgttcaattgtaaagcgggtttttcgaaaagcgatttgcaattgaatttataaattgacaccgcgcgcgaaataatgctatactactcgcatggtgcgcgtcacattcggcggtcacgaatatcagttgactggccgggtggccgacatcattatgtg

SEQ ID NO: 36555 - DNA, 260 bp, Unknown; identical to SEQ ID NO: 35981
  Description of Unknown: RightRegion for integrase B10556 sequence

SEQ ID NO: 36556 - DNA, 260 bp, Unknown
  Description of Unknown: RightRegion for integrase B10557 sequence
atccgactgacgacctacccggagcgcgggcggtacgacctggagatcgtgtggcgggtttaaggacgcagcattatggagccaacggtgttgttgcgtcctagaagagtcagccgccgacctggagaaactctggccgcgcggattgtggcggcgtgggtgaaggggggctagccctcccccaccaccggcagcgtcgtccggtcggcgggtggggcggcggccgggcgtgggaggtcgtgcgtgggtgcggaggcggg

SEQ ID NO: 36557 - DNA, 260 bp, Unknown
  Description of Unknown: RightRegion for integrase B10558 sequence
gggaagggcgacagcggcgggttggagctggtggcgtctgtaggcggtcccgcccccgagtagacaggaccgtcgcatcaggcggcgctgggggccggtggtccggcttccagcgagccgcgagggcgggggatgttcgggtactggttgcggccgtaggtggcggccgcggcgacgagggctatggccttgccgcagttgagggccttttcagcccacatgtagctctctccgtcaggttcgacgtcgaggacgagcgc

SEQ ID NO: 36558 - DNA, 260 bp, Unknown
  Description of Unknown: RightRegion for integrase B10559 sequence
gggctagacatcatcctgcgggaccgctccgacctgcccgaggacgcctcccctgcgaggtagttcatcacggaaccctccccctccgccgccaactaacacaggagcgcaggcgaatctggttttattgtggggtaaatgtgggttttttctgggccataaaccagaaaagacgcggcccctccggttagggagagaccgcgccagccatacccaggccagggcgtgttattcagaagacagaagccaggagacagaag

SEQ ID NO: 36559 - DNA, 62 bp, Unknown
  Description of Unknown: RightRegion for integrase B10560 sequence
aaagaaacgcaggaaatgactgttgttttgaatagtgacatatcgcttgtaaattgcaaata

SEQ ID NO: 36560 - DNA, 60 bp, Unknown
  Description of Unknown: RightRegion for integrase B10561 sequence
tctgagcaatctgcaagcggttcgcattttagcatattggtgggcaactcatacaataaa

SEQ ID NO: 36561 - DNA, 260 bp, Unknown
  Description of Unknown: RightRegion for integrase B10562 sequence
atcatttgtgaaggtttcatttgtttgtgcaaaaaaaatcagaaattcaattacagaatgtaaaaaaatcccttccggaagaaaatttccgaaagggattttaatattgtttaaatgcatttttaatggtattaaaacgggattttaatcgacaatttcccagtcttcagcgagcatgtctgcctgcgatgcaagccagccgagctgaatgccggaagtgccgacaaaagcgatagctttatttccgattgcatcgtgct

SEQ ID NO: 36562 - DNA, 260 bp, Unknown
  Description of Unknown: RightRegion for integrase B10563 sequence
aagaaaggttttagagaaaataataacagagattcctgccaagccgaaattcctagcgaataggaatataacggaaaacaataaactaagggttgccgcatactgcagagtctcaaccgataaatatgaacaagaagatagctatgaattacaatgtgctcacttcaaagaattcatagaaagcaaaccaaactggacactggtaaagatatatgccgatgaaggcaaatcgggaacacataaggcaaatagaaagaatt

SEQ ID NO: 36563 - DNA, 260 bp, Unknown
  Description of Unknown: RightRegion for integrase B10564 sequence
gacctcaccattgagttcaagatacctcgcccggaaatgagttttggttacttctcatcttaacgacattaggatacatatcgtcggtaggccagaggccgctcttcctggcggcttctgccaggtcgcacaccttgtcaatcccgaggattatgctctcgtcggtaccgataccctcgtcgttgataacctttatgttcatgagcaaggctccaggcgagacgccagccttctcagccggggcatgcatccctccggca

SEQ ID NO: 36564 - DNA, 60 bp, Unknown
  Description of Unknown: RightRegion for integrase B10565 sequence
tttcctatgtatattgatagaaatggtggagatgacgagagtcgaactcgtgtccgaaat

SEQ ID NO: 36565 - DNA, 260 bp, Unknown; identical to SEQ ID NO: 36481
  Description of Unknown: RightRegion for integrase B10566 sequence

SEQ ID NO: 36566 - DNA, 260 bp, Unknown
  Description of Unknown: RightRegion for integrase B10567 sequence
cgtgaaaaatcaaacagatatgaccaaaaacccgttctgatagacatcagacttaaattttgatcattgtatacatcttcgaggtgcttattcgtcagcacctcaatgatatacataacaaaaaaagggcagtctctcacactgcccttttaatttacttcacaaacttattaatttacttcacaaacttacgagcaaaattctcacccacaacgccattctgcgcaaagcctgccgctccgagaataccgttaacggct

SEQ ID NO: 36567 - DNA, 260 bp, Unknown
  Description of Unknown: RightRegion for integrase B10568 sequence
cagaatggggcgttgcacacgacgttccgaccggaggtctacgcgacaaccgacgaaacgtgacctcctttcctatcttgtcgcgtacgcttctaggtgcgcactatgatggttcggcggcggctacgattctccttctgcgatttgtcgctccagggcctcaatccgttcaacgtgtgcttggatcgggcgcacgccgttttcccagcggtggatattccaccaggtggtgccgaggcgcacggccagttgctgtttcg

SEQ ID NO: 36568 - DNA, 260 bp, Unknown
  Description of Unknown: RightRegion for integrase B10569 sequence
gaaggggacgccttttttaatcgagacgccccaatatcgatagacatagaatttcatgattaatcttctttcatgatgtttttaacgaacgtctttgcagggaatctattagcagtaacgttcactgagactttacttttcttcccctcgtaataagttccattgtctgttttctttgttgtaaatttgtttaattgcatttaagatacctctttcttttttatatttgtggtatcttagtgatttataaaaataaatat

SEQ ID NO: 36569 - DNA, 60 bp, Unknown
  Description of Unknown: RightRegion for integrase B10570 sequence
tgtcctacgtctggtggagatgaaccgctgcgttatgtagaacacataatacagcgtcag

SEQ ID NO: 36570 - DNA, 260 bp, Unknown
  Description of Unknown: RightRegion for integrase B10571 sequence
tcggatttggacttatcaagtccaccaaatcttatttggtctcctgcttcctgccatgcatagaatatgaaacaatgaaaaaatcaggcgcatcacacattcccacagcttctggccggtggttgcctcgctgcttctaatactggcactgctgcgcctgcccactggctgcgagtgggcgcactcataccggaacgccgaccgggtctgcgcgctggtgctgtccaccgatgagagcgatatccacgacaccggcctta

SEQ ID NO: 36571 - DNA, 260 bp, Unknown
  Description of Unknown: RightRegion for integrase B10572 sequence
acgaaggaaaagaaaaccaaaccccaggactttcaaattaccctaaccctccgccgtttttaatttacaaaaaagtaactgcatctgttaatgctgagaacaacactaacacatgcagttactttgttaatttctaaatttaagaaaatatccgcccggatttctccgagcggatacttttttattcctcattcagcagccaccggcaatgccgatcctcgcttcagttcctcctgtgcggtcattctctgcaccacgcc

SEQ ID NO: 36572 - DNA, 260 bp, Unknown
  Description of Unknown: RightRegion for integrase B10573 sequence
gacaatatcacctggaacaaagccgccaacaccctcaccatccactaccgcctcgtcctttagtcatgctcattttatggttaattgatatatggaggcccggacggcgagctcggcgcgtcgctgcgctacctctcccagcgttactccatgccctaccccgagctcaagggcctgctgaccgacatcggtacagaggaagcgtcatggaccccaattttgtcgcggtatttttccagtccgtccagcacatagaccca

SEQ ID NO: 36573 - DNA, 260 bp, Unknown
  Description of Unknown: RightRegion for integrase B10574 sequence
atgggaaaggaagataaaaatggcgagaagcattacagttataccagcgagtcagccttatagagtgggtggcaggactcagcagaaaacgagaaaccttcgggtagcggcatattgcagggtttctacagatcaggaagaacagttgaacagttttgaaaatcaagtggagtattacacaaaatatattcaggataatccattatatcagatggcaggcatttatgcagatgagggaatttcaggcacaaataccaaaa

SEQ ID NO: 36574 - DNA, 207 bp, Unknown
  Description of Unknown: RightRegion for integrase B10575 sequence
ccgtttgacgccctgttcgttttgggtgaaggggttccgagaaaacaagaatggcgtgcctgagaggattcgaacccccgacctttggatccggagaacaggacggcgagaaggatgcatggaagctccgatttcgagccatcatttccggcgcatcacgggcaggaccacctgagacgggtaggtggagttccgctcgacggtgag

SEQ ID NO: 36575 - DNA, 61 bp, Unknown
  Description of Unknown: RightRegion for integrase B10576 sequence
acgattactttatctgacataaataagtgttcggatattgagggtttcgctcggacgcggc

SEQ ID NO: 36576 - DNA, 260 bp, Unknown
  Description of Unknown: RightRegion for integrase B10577 sequence
cttggtgcaaagaaatatgagttcttctttctggaaggaagcaggataaaggtttccgtataaactattcggaaaccttattatcctgaaatccgaacaggtcaagctggctgctctgaccgtccatatccatccggtcagcatcgtcctgttccgggatatcggacggttcttcttccacggcttttttctgcgggagcttgtgggtataaagcttatcccaggtaagcggattccggctttttttgttgtagtatatc

SEQ ID NO: 36577 - DNA, 260 bp, Unknown; identical to SEQ ID NO: 36002
  Description of Unknown: RightRegion for integrase B10578 sequence

SEQ ID NO: 36578 - DNA, 260 bp, Unknown
  Description of Unknown: RightRegion for integrase B10579 sequence
cgtaatctactctttggcgaacaatatacgaacttaaacatatattatatatataataaataaataaagaggggtaatacccctcttttttagtgaattataattcattaaaagttagttctgtgctattttgtctttttctctactattaacaagtttagataatgatacacaaccctctattgcttcgctaatttgttcttctgtatatggaataccagcacccatacaccactctttgattagtgttgttgcgtatg

SEQ ID NO: 36579 - DNA, 260 bp, Unknown
  Description of Unknown: RightRegion for integrase B10580 sequence
tggcgtggcgatgccctgacgtggggtgagcgttggggcgccgaagcccgtatcgattcctgatcagcttgcttggctgcggtaggaagcagcctgcaggtacttgaggtagttgatccattcgcggcggctttcggcggagatgttgccgctttgcaggatctgcaggacttcctcgacttcggcggggagcgcatcgtctccgggggagatctcttcctcggtgaggtagccgagggcgactgcagcgcgccttggat

SEQ ID NO: 36580 - DNA, 61 bp, Unknown
  Description of Unknown: RightRegion for integrase B10581 sequence
ttccatgataaaactcttgaaagttcgcttttaaatgatttggtgacccagaagggattcg

SEQ ID NO: 36581 - DNA, 61 bp, Unknown
  Description of Unknown: RightRegion for integrase B10582 sequence
ggagaccagaacagcgttgagattcccttggagaccggagaagacccgccggatggcgggc

SEQ ID NO: 36582 - DNA, 260 bp, Unknown
  Description of Unknown: RightRegion for integrase B10583 sequence
ccacataacgcaattacagccttccaatactacgattttatctatgtttggctccggctgtaaaacgaaaaaaccgtccgaaatgggcggctttttctattttgcgttcaaaacagaaacaaaaacagaaacgaaaagcagccgccaaggttatacctgacggctgtctgaaatctatctgaaattatgcgcccggatccgccggggaatccatctgaacaaggccgttttcgcggatataatccagcattacgcccatt

SEQ ID NO: 36583 - DNA, 260 bp, Unknown
  Description of Unknown: RightRegion for integrase B10584 sequence
atccaacacaaccacaagaaacatattaaattcactcagggctggttacttattgtcgcttaaaatatacttatcgtatttatcatttttatccaatgaaaaaaatccggcagaaatcaaagctctgccggattttttattgatatttctataaaaacaacagggctattaccctgtttgaattcgcattgttcagtatttgccatgaccccggtcacttccgaaaacagtgacagcgattttcaatccccccggcagac

SEQ ID NO: 36584 - DNA, 260 bp, Unknown
  Description of Unknown: RightRegion for integrase B10585 sequence
acgatcacctaccgcgtcttcgtctcctcgtccccgcaaaccattgataccgctacattttaaccgcattgtagcctgccgccgtccgggcctcctgactccaatagacaagaaacaacgaattatcaacactttgcgggtcgcctatccctattcccctaccggactcccacaaacaacacaccgccccggagcgttttccctgctccggggcggccttcttcacttcggataatactgtgtccgcagctgcaagctgt

SEQ ID NO: 36585 - DNA, 260 bp, Unknown
  Description of Unknown: RightRegion for integrase B10586 sequence
gagacgactgtccgcggaaaatggcagaatgtcccttttgaacttgatatcgagcttttataactatcatttacatcattaatgagctaattcgtaagtacattaatgatagataagagattttcaacaaaaaagcccctccaataatcaaggaagggcttttcttaatctaatttaatttgatgcgttagcttttggcttttggagattgcctatatatcggcttttattaacttgcttataacatgctaatagacaat

SEQ ID NO: 36586 - DNA, 61 bp, Unknown
  Description of Unknown: RightRegion for integrase B10587 sequence
ggtacttttaccgtcaacgtgggcgtacatacgaatggttgcggaggcaggactcgaacct

SEQ ID NO: 36587 - DNA, 260 bp, Unknown
  Description of Unknown: RightRegion for integrase B10588 sequence
gtggtttactactgcaaaaaaacggaacctaaaagaattcgactggaaatatatttcaggtgagtgtcataagtgaacgtgccactggtgccacgtcatcttatgacaccaatttttaggttgtataggagcaaaaaaatacctgccataagagcaggtgagcgtatccctaatggtacttaacttttccctttttgatattcctcatgtaatttgatcaattcttttatataattatcaattcccttttgggatggttc

SEQ ID NO: 36588 - DNA, 260 bp, Unknown
  Description of Unknown: RightRegion for integrase B10589 sequence
tcaaatcgaacccttgccatatatcgcggcagcattcttctggtcggatccatctttcaataaaaatgggccgcggacgcatccccagcccatgtcctcaccggattccgtgccggcaaggaggtcacgtctttgattataccagaatccgactcaataaaaaaggccggagctttatgctccggtttcttttatgctgtcctatgcaggtctttggtcggaagatcatagacctttttcatccttgcctccatgtcccc

SEQ ID NO: 36589 - DNA, 260 bp, Unknown
  Description of Unknown: RightRegion for integrase B10590 sequence
ggggtattcttcttcgacggtataatggtcgcgattgcttcggcagaaaagaaaaagggctgacggatgaccgccagccctttctttatatattcgactactcatctttatgagcagcgatgtcggctcttatcagctgtttaatatatcccgacttatttggaacgctctcgagcttgtctataatatcctgctcagtagtagtgaaacaaggaagcgaatactgctttttatattttgccgcgtagcggtcctgcgga

SEQ ID NO: 36590 - DNA, 260 bp, Unknown
  Description of Unknown: RightRegion for integrase B10591 sequence
atccaacacaaccacaagaaacatatcaaattcactcagggctggcttcttatcgccgcttaaaatatacttatcgtatttatcatttttatccaatgaaaaaatccggcagaaatcaaagcactgccggatttttcattgatattccgataaaaataacagggctattaccctgtttgaattcgcattgttcagtatttgccctgaccccggtcacttccgaaaacagtgacagcgattttcaatccccctattcagga

SEQ ID NO: 36591 - DNA, 260 bp, Unknown
  Description of Unknown: RightRegion for integrase B10592 sequence
gagacgactgtccgcggaaaatggcagaatgtcccttttgaactcgatatcgagcttttataactatcatttacatcattaatgagctaattcgtaagtacattaatgatagataagagattttcaacaaaaaagcccctccaataatcaaggaagggcttttcttaatctaaattaacttgatgcgttagcttttggcttttggagattgcctatatatcggcttgtattaacttgcttataacttgctaatagacaat

SEQ ID NO: 36592 - DNA, 260 bp, Unknown
  Description of Unknown: RightRegion for integrase B10593 sequence
cgggagaagcaggcactgaaaacacagccggtactcaacgagaaacggcggataaggcagtgacagacgaaatccttgaggaagcgcgaactcgggtgctagctgatattgatgctgcgcttgcacgcgactggaacaacatccgcctgtgttccacgctcgaacgtgaacggaagatcattcttcaatccgactggcagccgagccggccaccacgccggatgccgtcactctgggccatcgcctcctactgggacgag

SEQ ID NO: 36593 - DNA, 61 bp, Unknown
  Description of Unknown: RightRegion for integrase B10594 sequence
aaggaacaggccattgaatgttcgcactcatgcgatatggtggaccaccaggggttcgaac

SEQ ID NO: 36594 - DNA, 260 bp, Unknown
  Description of Unknown: RightRegion for integrase B10595 sequence
cggaatggcccaactttgagcatttggctggtcattccgagaacagaaaaaagcacccggtgagggtgctttcttcttatcttaattattcctcgttgaagcggaattcttcttccgggtcttcgacttcctcgtcttcgggctgggccggggtctggtagcccttggaatccgtcagcccttccgcgaacagatatccgaccaccgaggccgccgccatgatgatgccggtgatcgtttcggccgtctccgcagagcct

SEQ ID NO: 36595 - DNA, 59 bp, Unknown
  Description of Unknown: RightRegion for integrase B10596 sequence
actatttcggatttggacttatcaagtccaccattacaatctaatccgaacattttttg

SEQ ID NO: 36596 - DNA, 132 bp, Unknown
  Description of Unknown: RightRegion for integrase B10597 sequence
acaaaaacgtaccgcctaaacaaaggcggcacgttgtcggatttcacttccaatgcaccatgattgaaaagcagaaaaaagagaatggcgaggcattgatctctaccgttctctttgacaacgtgagcgagg

SEQ ID NO: 36597 - DNA, 61 bp, Unknown
  Description of Unknown: RightRegion for integrase B10598 sequence
actatttcggatttagacttatcaagtccaccaaaaataaggccatctgcctttggcagat

SEQ ID NO: 36598 - DNA, 260 bp, Unknown
  Description of Unknown: RightRegion for integrase B10599 sequence
tcgcgcgtgcacctacccccgccggccaaaacaggccccaaggtctacaaagacaaaacctaggcaattcaacaacctgcctgccctgtgagcctcaaggtaaaaggccagtgtaccccagaaacaaaaatagcggcgcagtctcaaagacttgcgccgctattgtcattttttaggaacaattgctctaccaactgagctaagatggcgtgacaattatctggtaacttgctgaaagataaatgacaatcgctgttttg

SEQ ID NO: 36599 - DNA, 60 bp, Unknown
  Description of Unknown: RightRegion for integrase B10600 sequence
atcgaccttctggtaaattccgtgacggtatgggacgaacctgacggatataaaattacc

SEQ ID NO: 36600 - DNA, 61 bp, Unknown
  Description of Unknown: RightRegion for integrase B10601 sequence
caagaaaaaacgtaccgcctaccgaaaggcggtacgttgtcggatttagcactcaatccac

SEQ ID NO: 36601 - DNA, 260 bp, Unknown
  Description of Unknown: RightRegion for integrase B10602 sequence
tctaacgtggcgtggtgcgtggtggacggcgggctgctgctgagggcgccgctcgccgcatgacgaaaacgccccccgccacgtgggcgaggggcgtgcgtcacgggacgatgtggtggtgtccgcttggtgtccgcgaaaggaggaaggatgcgcgatgcccagagagagggagaggccatcgtcccggtgaagcctattctgcgggcgtttcgacgaaggccgcccacatggtgccgtaaatcgatgacgggacgtac

SEQ ID NO: 36602 - DNA, 260 bp, Unknown
  Description of Unknown: RightRegion for integrase B10603 sequence
gagtaccagaaccgcgccccggtcttcaaggacgagatcgagctgcgcatcatcatccgctagtgttgtcacctctacccgctagctcgtttgcgggtacatgtgacagcacagcattgagctgggaatacaatacgcccgccgagccgaggcccgacgggcgtctgcgacgtatgacgcgggacgccgcaacccgctcgaaccaaggcgtctagcaccgccctgtacacatgtggcggagcgccgaggattcgaacctc

SEQ ID NO: 36603 - DNA, 244 bp, Unknown
  Description of Unknown: RightRegion for integrase B10604 sequence
cctcgaaccgaggtgtgcgcaatcggcacgattatcttcgttaggataccacgagcggcctaggaaacaaccaggcgcatgccgggatagatcagattcgggtttgagatgccgttcttggcggcgagatcctgataggtcgtgccgtactttgaggcgattccggaaagggtgtcgccgctttgcaccacgtacacctgctcggtttcggcctgcccgttgatgaccgccataacctcgtcgt

SEQ ID NO: 36604 - DNA, 260 bp, Unknown
  Description of Unknown: RightRegion for integrase B10605 sequence
cccggcgctaaatgggcggtagtgcccggggcgctgctattgagggtagagctcgcggcctagaccagcgacgatgcgtagacggcgatgccctcgcggccgccgtcgacgaactccacggcgaagccgcgcccctggagggccagcgcagccgcgcgggcgttggcgttggccatcctccagtccccggcgacgcccagggccgagtcggtcgacttctcgaggtagctctcggcgtccggccagtagggtatccagat

SEQ ID NO: 36605 - DNA, 260 bp, Unknown
  Description of Unknown: RightRegion for integrase B10606 sequence
tggaaagagaagaagaccaagcccacggatttccgcctggatgtacagatcaagccgaattagggggtagtggttaaaaggcgttatatcttacgataaagatataacgccttttaaccactcaagtccccctcaaaaaatctcccccaaatcctcaaaaacctcttgacatttacacgcgttgcgtgtatactataaccaagctaagagatcaccccaccgacaaaaggaggacaacgatatgaagatcaacacccacg

SEQ ID NO: 36606 - DNA, 260 bp, Unknown
  Description of Unknown: RightRegion for integrase B10607 sequence
agaaagttaattaaagaaattgtagttgtggatgctgaaacagtttatatttacacgtactaggtcgccgtatggggcgaccttttgacatcaaaatttcgtttttgatatcaaaagggtacgtcatggagttatttaggaacgaatgtttggtttggcaataaaaagaaaagcccaaaagggctatttatttaacaattttaacatctgatggttcagcactcatgccaggaatggtaatatttgcgccaattgtactt

SEQ ID NO: 36607 - DNA, 260 bp, Unknown
  Description of Unknown: RightRegion for integrase B10608 sequence
acgggagtgtggcgggaccgggtaatcatcatcccgagctgggaagcacctactgtcggttagcggcatacgtcgtgcatcgtgtatcacaaaccgctatcacgcctctgcacttatatgagcacgcacaccatcaccgaagcgaccacgtgcgccgagtgcgacatcccgatcgtcgacgtcgacggtcacgcccgatggcacgccgagctgcacaccgaagcgtccggccgctcccgcatcaacgcccccgcgctcct

SEQ ID NO: 36608 - DNA, 260 bp, Unknown
  Description of Unknown: RightRegion for integrase B10609 sequence
gcaaaaagtatgatcgaccgggtggttttgagtgaggatggcgtggatgttcggttcaaataaaaaagaggaaaacaaccgtttttcctcttttctttttctttcctatgtatccacacctgaaacaaaaatacttcccgtaattctggcattttatatattgacattgagcaaacattcctttattttatggtagggggaggtttccctcccctgttctcataccagctctctgataatttctatcaggacttctatga

SEQ ID NO: 36609 - DNA, 260 bp, Unknown
  Description of Unknown: RightRegion for integrase B10610 sequence
gagatccttcccgggccggtgttcggcgcggccgccccggctgcgccgctgaccgtcccgtagccccggatcaagggcgcaccggctggcacgtgccgtccggggccgtctgtcccggcgacccggccaccgtgcagtacgtgccgttcccgtcgtagcggccttgcagcaggagcccggccgtgatcatcgcggccacggcagcgcaggccaggagcacgagcacgggatgccggaatcgcgtcatgagtgctgcctgt

SEQ ID NO: 36610 - DNA, 260 bp, Unknown; identical to SEQ ID NO: 35873
  Description of Unknown: RightRegion for integrase B10611 sequence

SEQ ID NO: 36611 - DNA, 260 bp, Unknown
  Description of Unknown: RightRegion for integrase B10612 sequence
acgcttatctcgtttatagagatcgataacgaggatatttatatccactggaaatttgcataaaaatacaaaaaagaggatcccgaaagtcgggacctcttttctataggatttaaagttttcgtaattcctggtagactctgcttatcggtaaacccattacgttataatagtctccggtaataccctttataaatttagcgaacgtcccctggatcgcgtaaccgccggctttatccgcccactccggagccttttta

SEQ ID NO: 36612 - DNA, 260 bp, Unknown
  Description of Unknown: RightRegion for integrase B10613 sequence
agtcgaacccaggtactggcgctcgggcgctccgtgttcatcaggttttctcgggccgcctaaaatagcaactactgaaaaaggggaggccccgcgaggagcctccccttttttgttttggctatccaaccaccagcacttggccggggtagatcacgttcgggttcgccagcccgttcgccttggccagcgtccggtagtccgtgccgtacttggcggcgatgccagagagcgtgtcgccgctcttgaccgtgtaggtc

SEQ ID NO: 36613 - DNA, 260 bp, Unknown
  Description of Unknown: RightRegion for integrase B10614 sequence
ccggagccatacaaaccatcaaccagaaagccccgcgctacaaaccgcaacacagcgaaataacatcacttttaatacttcatcaaaaaagaccaaaaaccatttgtagccacaaaaacaaaaaaaaccaacaacttaaagtagttgatggctttatgatctaaatcgagctctcacgctctaccaactgagctaagagggaagatcatgtgtccgctaagtgttagcctttactgcttttttaactgttttttggctac

SEQ ID NO: 36614 - DNA, 260 bp, Unknown
  Description of Unknown: RightRegion for integrase B10615 sequence
aagatttttataaaacaggtcgttcttcgcgacggtgagattgaaattaaatttataatttaggagtggtgaaccgcatgattatttacgtctgttccgcatacagcggaatcccgggattaaacgacaaccgggaggaaaatataaaggctgcggaggatatctgccggtttattatgaaaaaaggttatacaccgtttgccccgcacctgctttatacgcgcttcaccgacgacgaccgtcccgatcagcgcaaggcc

SEQ ID NO: 36615 - DNA, 260 bp, Unknown
  Description of Unknown: RightRegion for integrase B10616 sequence
tctaacgtgttgtggctggtcgagggcacgacggtcatgctgcgcgtgccgctggcggcgtgacgcccccgccggagcgggggcgcgtcgcactcgtggcgtcagcggcgatggggggtggcgtgccgccgatggctgggaaggttgcgaaggccagcacgcgccacggtgccgtcagatgatgagggccccaatcgcgagcccgacgaacaggccgatgaggaagagcagcgtctgcctgtccgcacgctcctcgatgc

SEQ ID NO: 36616 - DNA, 260 bp, Unknown
  Description of Unknown: RightRegion for integrase B10617 sequence
gagaaagcactcaaaaagaatgcctcccacaatgtcgatttaaagctattccctcgaatatgataaggttaaggaactgattcctctgttccttaaccttatcatattcatttaactcactttgattgaaaaatacagatttctttcatattttatagaattcaaacttttcacattttctaaatataaatttactattaacccatcttgccatacgtttagttaactctggtgcattccatttttcaaatatcataata

SEQ ID NO: 36617 - DNA, 260 bp, Unknown
  Description of Unknown: RightRegion for integrase B10618 sequence
gttaaactcccaccgatctcacgcggcacccgcaaaggcctcgccccccgttacaaggcctaagtccgcgatttaaaagactttcgcccacaaaccaaaaaccgccccgtaacgcaaaaaataaaaaaggccagcaaccttgaatggttgctggccgtattctcttttccacgctcacccgctctaccaactgagctatcggggaagagaatagtttttctaactcgccgtttttacgagatgaaaaactattttgccgt

SEQ ID NO: 36618 - DNA, 260 bp, Unknown
  Description of Unknown: RightRegion for integrase B10619 sequence
ggcaccgccaccgcaaaaatcaacctgcctgcaacacaccgtggaaaaaggatcgacaaatagaaaaagcccgcaagcgggctttaagttgttaacggtttgttcacctgctctaccgactgagctaatggggaaagaggttttccagctgacgccctgtttatgtggcttgaaaggtgtttttgctctgcaaatacgccttaaaaacctgctaaaacccgtgcatcaacgaggtgggtttatagcatgttattttttat

SEQ ID NO: 36619 - DNA, 260 bp, Unknown
  Description of Unknown: RightRegion for integrase B10620 sequence
atattttttagaaagatagaaataatccctcaaaagaatactgaaacaactatgagcttttaaaagaaaagccctcctttaaccaggagggcttttctaatgagtcgggatgacatgattcgaacatgcgacctcacggtcccgaaccgtgcgctctagccaagctgagctacatcccggggaatggtgtctatcgggtgcaaatgctctaccaagtcaacccaatagacacctaaagatcccttgttttgtgccgcttc

SEQ ID NO: 36620 - DNA, 260 bp, Unknown
  Description of Unknown: RightRegion for integrase B10621 sequence
tccgcgatcggcgtctgggaggacccgagcaccgatgagtggctggcttcaagaccagcgtaatagtgaccaatcactgacatgaacgctgcgattgcctggtctttagagacaactgtcacgtcctccttgcgtgttcgaggggccgtggatgcggtctgcttcaaccccgaaagagtgaagatcccctgaccgtgaagcttgatcgctacactgcggccatgactcgtactcaggggtaccctcacagcaggctgctc

SEQ ID NO: 36621 - DNA, 260 bp, Unknown
  Description of Unknown: RightRegion for integrase B10622 sequence
gacaagattatctacgatcgcaaaaacgattctctcaaaatctactttttcttatacaggtaaaatgcccgcaaaccaagtaaaatcaagagtttgcgtgtactttataggttatgacaatttggttgacctttttgtcataacctataaagtggatttttacctatttatatttataatgctatcctacatatgtcttaccactatattgatggaatctttattttttcatccgaccatccgcttcaaaataatattct

SEQ ID NO: 36622 - DNA, 260 bp, Unknown; identical to SEQ ID NO: 36035
  Description of Unknown: RightRegion for integrase B10623 sequence

SEQ ID NO: 36623 - DNA, 62 bp, Unknown
  Description of Unknown: RightRegion for integrase B10624 sequence
gaccacatcgtgtttgaccgcggaaacacaagtctcgatatgttcctaaagcttgtaattta

SEQ ID NO: 36624 - DNA, 214 bp, Unknown
  Description of Unknown: RightRegion for integrase B10625 sequence
gacaagattatctacgatcgcaagaacgattctcttaaaatctactttttcctatacaggtaaaatgcccgcaagcccagtaaaatcaagggtttgcgggtgctttataggttgtgacaatttggttgaccgtttgtctttaaaatgtaccctatagattagacagtttgagtttttaaaacccttaccattggacagtaagttttaatgaaaa

SEQ ID NO: 36625 - DNA, 62 bp, Unknown
  Description of Unknown: RightRegion for integrase B10626 sequence
gaccacatcgtgtttgaccgcggaaatacaagtctcgatatgttcctaaagcttgtaattta

SEQ ID NO: 36626 - DNA, 260 bp, Unknown
  Description of Unknown: RightRegion for integrase B10627 sequence
gcgcgggtcgaggtttggaacggcgaaccgatcccgaggatctacccacgcttcttcgagtgactgctaacggctacatcgttgacgtgacatggccgttggcgcgccgaccgttcccgaacaccagtgctgtatagctgcctaggcgctatcaccgaacgcttgacggggcagcgttctggggcgagatttgtcgctagacgcacgaacgccccggaggtcgcagtccggggcgctcgcttcggtcaccggctacgagg

SEQ ID NO: 36627 - DNA, 260 bp, Unknown
  Description of Unknown: RightRegion for integrase B10628 sequence
attgtaggaatgtcaaacctcgcaaccataaacaacaagccgtgcataatattagccgcgtgaaaaaaatagaggagtgccgttatggcactcctcttcatagtatgacgggcatgccgtcagtctgtggtgaaagtccacgaggggcgtagttgccgacgaaccccaaagcgactcccaaggtttgtatcgtgaggtgcaggcgagaagaagggatagcgaaatcgtagcctgacgaacaggaacctgatacaaggcgt

SEQ ID NO: 36628 - DNA, 60 bp, Unknown
  Description of Unknown: RightRegion for integrase B10629 sequence
tccgtaccagacgagtgttcgcttagtacggtcaagtggacttgcggaaactctaaacga

SEQ ID NO: 36629 - DNA, 260 bp, Unknown
  Description of Unknown: RightRegion for integrase B10630 sequence
atatccgcccagcaggcgataagtgctctcaaatatatggttgatggtgaggtttatttttgagtaataatcactttttcaaccgtgctatggtatgaaagtaaagtaactactatgatattaactatcgagcaagaatatccccaggcactcaacagggcgcaggtcaacgtgaatcggtcatgacacgacaccgattttgcggaatcaatgttgcttatgaatacaacatcccgcttagtacatgttcaacacatcag

SEQ ID NO: 36630 - DNA, 260 bp, Unknown
  Description of Unknown: RightRegion for integrase B10631 sequence
atctcgccagagcttcgagacttgttacccagccatcttcagtttgccatcgctcaagcttaacgcggtggccaaacctgttgcgtcttccaacggtgcaaagtctttgcaccctcttgtatttcatgcctaggacttcacccaatcgaagatttccatctgcatccatgttgctatttttctaccccataagtggtatgacgcgacacgatgtcgtaccaggcccccgaaagagtgggtcacagagtactccgtgacga

SEQ ID NO: 36631 - DNA, 260 bp, Unknown
  Description of Unknown: RightRegion for integrase B10632 sequence
  modified_base (138)..(237): a, c, t, g, unknown or other
attgaagatatcgtatatgataagaaaaatgggcaaatgatttttactctttacatctcgtaaccccttgaaatacaagggcttacgggtatgttataggttattgcaattcggaggcccatattgttgtaacctatnnnnnnnnnnnnnnnnnnnnnnnnnnnnnnnnnnnnnnnnnnnnnnnnnnnnnnnnnnnnnnnnnnnnnnnnnnnnnnnnnnnnnnnnnnnnnnnnnnnnaatatataaataggaaatttcaa

SEQ ID NO: 36632 - DNA, 260 bp, Unknown
  Description of Unknown: RightRegion for integrase B10633 sequence
tctctaatttattacatcgaattagataacgacgacgtttatatttattggaaatttgcataaaaaaagaggctctccattcctggagagtcttttttatattgcttttatttcttttaacatttgatacagacggctaaccggtaaacccattacgttaaaataatcgccgtttattcgctcaacggctaacataccaaaaggctcttgaatcccataaccgccggctttatccctccaattaccgaggcttttctctg

SEQ ID NO: 36633 - DNA, 260 bp, Unknown
  Description of Unknown: RightRegion for integrase B10634 sequence
aacactgaaaaggtcctcttggatttaccctacgcgctgttgtgggtagaatccatttgttaagacgtttatgagggacgttattaacacccctcattatagaccaggtgtggtacctttgtctatacatgcaaaaagagcgccccggatgttgcatccaaaggcgctctttaaggaagatttgacctcgtggcagacgtgggtcaaaactatttgggcggaatctttaacacctgtcccgaacggatcacgttattctt

SEQ ID NO: 36634 - DNA, 260 bp, Unknown
  Description of Unknown: RightRegion for integrase B10635 sequence
gaatataaacgtgaaaaatccgctcccgagggcgatattttcttgaaaatctattataaataacttttacccgccttatgtatcttgttgccatagatgtcgccatagcaatccataatattccggaaggaattgctacgtctgtaccgatatactactcaacaggcagcagaaaaagagcatttatagtatcgtttttttcgggtattacggaacctttaggtgctataatcggttatttaattttacgtccgtttttc

SEQ ID NO: 36635 - DNA, 260 bp, Unknown
  Description of Unknown: RightRegion for integrase B10636 sequence
gtcacggttgaggggtcgcgtgaatggcgggtcaagtggcgcctactcgtttgtccacggtaggcacggtgaacacggcgacgaccgtaggcaagcaaggggccccggtggtgagccggggcctgggtagtaggctagtcggggaaatcctgttggtccgctcctggagtgcactcgtaatgccggggcctggagtcggcgaacgacgcgtaccaaggtgcgttcacgatgattgctccgcaaacggcgcagcgagggac

SEQ ID NO: 36636 - DNA, 260 bp, Unknown
  Description of Unknown: RightRegion for integrase B10637 sequence
gaatataaacgtgaaaaatccgctcccgagggcgatattttcttaaaaatctattataaataactttttacccaccttatgtatcttgttgccatagctgtatagataacaacaagatacccaaccaaaaaagaacataagtattttgcctatgttcttttctaattatatacacatactatttatcacgaacttcaaaaattaaatctcctggctttatatgctctgtatttttatcattttttgatattatatgtatt

SEQ ID NO: 36637 - DNA, 260 bp, Unknown
  Description of Unknown: RightRegion for integrase B10638 sequence
tctagaaccgagatctgcgccgttgggaccgtcgtgctgctcaggataccacgggcggcgtagcaacaccttttctcgagaaaaaacccgcccgggataacccgagcgggccgcggctagcgcccgttgatgctcacgaggcacaggccgattgtcgccacggtgccgccgaagagcgcgccgaggacgaaagccagcgcgatcatgctagtacgggttgccgtcggtgacgcagacttggagtcggtcgagcggctcgc

SEQ ID NO: 36638 - DNA, 260 bp, Unknown
  Description of Unknown: RightRegion for integrase B10639 sequence
gatgtcccgtcgccgcttcccggtgttgatggctggtcgcagttgacgcctattcggtcgtagcgctcggcgaccatggctctgaggtgggctgccatgctgggtgtctcccctctgtttcaaatgggacttgtctcaaagtgtgcagtggtggccatgatcgacccatggccaccactgtcgttgttgacccatcagtgcctgccgcgactcgcagagccgttgacgaacagttctgccgtgacctagctcgtcgccat

SEQ ID NO: 36639 - DNA, 260 bp, Unknown
  Description of Unknown: RightRegion for integrase B10640 sequence
ccatacgacttcccaccgccactgggggtgccgctgggtcatgatggcgaccagggcacgtgacaggccttccttagcttccggagtcacccctccccctcccgctgcatcgactccaagatctgcaggtaaccgacgatgtccaggcgggtgtcctcaatcaggagtgccgggtctctcgccagcttcgcgtggatcatgaggcgcggatagtcctcgggctcgacctcgacgccgagtgcgtcctgcgccgaccgggc

SEQ ID NO: 36640 - DNA, 260 bp, Unknown
  Description of Unknown: RightRegion for integrase B10641 sequence
gaggtgaacaagcagggtgaattctttatcgctattactttgcctgattctatcgaaatttagcaaacgggaaaccttccgacaatttcaaaatagggaaggtttcccgtttgcggttttatatctttccttcatataataaggatttcaagagttctattccgtcattgaatccctgcttatatgtattttccagaagagcatccactcttgatgttgataattcttcatagcgatcaaaaatatttctttccttaccc

SEQ ID NO: 36641 - DNA, 260 bp, Unknown
  Description of Unknown: RightRegion for integrase B10642 sequence
gcactgattgaaagaattgacattgactgtaatgatgtcacaatacattggaatttcatataaaaaaggcacaccatccagcatgccttaaaaaattatgacttgaataccatgttgaacagtttgctttagcgaattgcacaacatggtatttgtttttttagctttcttccggcactgacttataaaccacgaatgtcacacttacaccggcttcttcaattggtgtttccaagttcacagtattgtttgtaatggtg

SEQ ID NO: 36642 - DNA, 260 bp, Unknown
  Description of Unknown: RightRegion for integrase B10643 sequence
ttacctgtaagcgaaacggaaataaaaagttcctctatcataagaagaacaatgtttttttaatggtggggatagccagatttgaactgacgacctctacacccccagtgtagcgttctaccaagctgaactatatccccatttactttaatataaaagggtggattggacaggctcgcacctgcaaaccattacaatccacccctttcttataaaaaacaagcctatataataggaagaaactcattttaaatcattat

SEQ ID NO: 36643 - DNA, 260 bp, Unknown
  Description of Unknown: RightRegion for integrase B10644 sequence
gagggtggtcgtgggctcagcccggacaccctccgaatcgaaccaaagaaaggtgggtcatgaagacgttatttgaggatctagaggcgctagaggtgatggtggcgttgagagagagggaggtccagcaggctcaggaagctcttgacgctgccctgaaccgttacggccaggcaatcgctcgccgtactacggcccaccttgagggcagggtagttggccatgagccaggttcctgagcgccgatccgagggcgtttc

SEQ ID NO: 36644 - DNA, 260 bp, Unknown
  Description of Unknown: RightRegion for integrase B10645 sequence
actgtaaaaatgtgcagaaacaagaaattttccgaccttaccttaaaggttgattttttatgatataaatgtacaacatatataccttataaaattacaatatctttcttgtacatataaaaaatatccctctgcctgaattaaatcagacagagggattttctttacttttcggtaagtgtaccggaatatgtctcaccatcaatagtaagagtaacagagacagacttcgtacttttggcagcgtttttatttctgct

SEQ ID NO: 36645 - DNA, 260 bp, Unknown
  Description of Unknown: RightRegion for integrase B10646 sequence
cagaacgccggcctgcgcgtcgagatcgaggccggcgccatcacctccatccgccttgtgtaatcccagtcaccacagcatactggtgccgtagccactacaactacacgaattgattcctgagccagtctacttccacccggttcgacgccgccacactcggattctccccgaacacccccgcccggcctgccaccggtgcccacgccaccgcgttgctcatattcatgctcaccgtcgaaccatcctccgctaatatg

SEQ ID NO: 36646 - DNA, 260 bp, Unknown
  Description of Unknown: RightRegion for integrase B10647 sequence
cgagtggacgaaacgcacaaaaacgggaaatatgatattaggtttttaattcacttcatataatgtgattgcaggatgcgcttttagtagttcgtttccgtccgtcattttgatagccgatgcaaagaaactactaaaatgaaaagtcccggatttctccgaggctccccagcggcctccgcaaagtgccgccgcaattgcttatattatagcacgttcaccgcgaaacggcaacgccaacagcgacaaggcataatact

SEQ ID NO: 36647 - DNA, 156 bp, Unknown
  Description of Unknown: RightRegion for integrase B10648 sequence
gacaaagcagaagtacaatttacgatatttgaaaatgtcgttagtttacatggcggagagtgaggggttcgaaccctcgccgcccttacggacgctaaacgtttagcaaacgttccccttaaccacttgggtaactctccatatacaaatttctcg

SEQ ID NO: 36648 - DNA, 260 bp, Unknown
  Description of Unknown: RightRegion for integrase B10649 sequence
gcccgacttgataacaactatggccataactatgacctcgacttgaaaatatcgttcaaataaaaagagcccatctgcgtagatgggcttgtttgttatatgcagaagttgtctgtatcggtaacctatgtcaagcggctaccgattaaaactacttcttatcgagtaccacgggtcctttgttcgatttcctcttcatgcgcgcggacgtatttttctacggcggattttatacaatccgaaacggattcaggatagat

SEQ ID NO: 36649 - DNA, 260 bp, Unknown
  Description of Unknown: RightRegion for integrase B10650 sequence
tcatgcagccttacccaaaacataattatccacgaaaaaggctggctgattataccagcataaaaaacaagggtctcctgcctgagcagagagacccttaatttttgtacagaaatttctgaaattctatttaaggaaactgaaaccgtttcagaaatagctaatctcaatcctcggtgagcagtccgctgtaggtgtggtcatcgaccgtcagagccactttcacggactttttcgccgccgaagctgagccaggacga

SEQ ID NO: 36650 - DNA, 260 bp, Unknown
  Description of Unknown: RightRegion for integrase B10651 sequence
gacacttcgaagtatatttatatatattctgcatttgaaatagaaaaaagagcctttagttaggctcttttatatataatttaatagtgtttctaattgcgttttgctgacactttgtgatctaacatatggttcaaggttcatagttgtatagtcttgtgcatatcctagataacccatgatgagcgctttttgttgaactgtcagccccatacgatttagcatcattttgattttgatcttcttagaaccattcacaa

SEQ ID NO: 36651 - DNA, 260 bp, Unknown
  Description of Unknown: RightRegion for integrase B10652 sequence
gtccaaggccgcaccagcgttagctgttttggcttgggggctgataaaccggaagctcgttagccacctgctcggtcaccagtagtgcagcagaaggcgcgtactcttcctcccacatgttgttttccataggccctccatccttacggattgatcttagccacagagaaccaggacacagtcccggtgctctctccgcctacgttgacggcgacaggagccggggtgccagccaggttctgcgaccacaagccgggtgc

SEQ ID NO: 36652 - DNA, 260 bp, Unknown
  Description of Unknown: RightRegion for integrase B10653 sequence
agaaaaacttataaagaagaaattgataataattttgaattaaaaatatttcttaaaatataggtattgtaataccttcttcaatatgttattattataaaataaatagggttatcataaaacctccattcaataggaagttttatgatacctccaaataagagttcataaaacctttgatgaaatataggagtgtagagaggaaaaccacttaaaatcaacctttacaactaaccattgtaggaattgccgtttgaggg

SEQ ID NO: 36653 - DNA, 260 bp, Unknown
  Description of Unknown: RightRegion for integrase B10654 sequence
cgcgaagcccgcatccagttcccgcctcgccaggccggctacatccgattgcagaggaaatgaaaaaggcccggaagctttgacgcctccgggccttctctattactgtaggctgaatcctttcaattcgagccacaaaccattgcagttgactccacactattgagcggatccttcagcattgagctgatgtagttaaagacttttcttttgcagagctcatagatggagcccggcaatcttgccagaaccagcccgac

SEQ ID NO: 36654 - DNA, 260 bp, Unknown
  Description of Unknown: RightRegion for integrase B10655 sequence
ggtaagagcggccccaagccgatgccagtaattgaccgggtgattcttgagccgcagggttgacactggccagcagcgcgaactacggtcagtgaccgtgaaggtgtttaccaccaactaactaccgtcagccggggcgcgagacaagccccggccgaccagcggacggtcgcaaaagccccgccatcgaccagcggacggtcgtaaaagccccgccatcgcccgagagcgggagggcgtaaaaccaccccgagatcacc

SEQ ID NO: 36655 - DNA, 245 bp, Unknown
  Description of Unknown: RightRegion for integrase B10656 sequence
tcaggcagcgccctggcacgggtccacctaccaccgccaaggcctaccagaccgcaaaaataaagggcttccggcagtacgctggaggccctttattgattactttgtatgctcactctctctaccatctgagctaaagtggcgtgaagagagctcatcttctataacattgagtggtttaagtcaagtccgggtaggatcgcagggcacactttatctcgttgttttgagatgtctgattgaca

SEQ ID NO: 36656 - DNA, 260 bp, Unknown
  Description of Unknown: RightRegion for integrase B10657 sequence
atgaagagtgggtgcttttacagtgtacagggtaaaggaatcagttattatgatataaaatagtccagattacgcaagaaaaatcgaaacgataaattaatcgtctcgctcttttatgcgctccacaattaaaaccagctatcaagaataagaaaagagaggctcttttgaagtctctctttttctaaatatatagagtttataagttttatgttgtaggtgtatctgctgtgaaacttaaattccaatgtagtgtaata

SEQ ID NO: 36657 - DNA, 260 bp, Unknown
  Description of Unknown: RightRegion for integrase B10658 sequence
tattcatatagtgcaacacaaaacataatttatatgaataactggatactgatagtagcataaaaaacctccgacagggagaatcttttccctgtcggaggtttgctgtatcacattaaatttcttcgagagtaaccttatatttcttgccattcagtgagagttcgccaatctgaggagcaggcttttcctgaacgggagcaggagcaggattttcaggctttttaaagccgttaagccctgcatttttgattatagta

SEQ ID NO: 36658 - DNA, 237 bp, Unknown
  Description of Unknown: RightRegion for integrase B10659 sequence
tcccttatcgaaaaaatagaagtattaaacggggatataactatcttctggaaattccaataaaagccggggctccgggccctggcttttctatactacaaaaggcgacctattctattgattaagcctgcgccgtaagtataggttatccgctctctttcttcattgtaaacgccaaagacattctttccataagaagtctttaccagcacctgactgtataccgcttccctgtcc

SEQ ID NO: 36659 - DNA, 260 bp, Unknown
  Description of Unknown: RightRegion for integrase B10660 sequence
ggttgcggcggttcgcaacatattttacccaaaattcttttcaaatacatattcaaaaaataaaaacctccgacagagagaacatcttccctgtcggaggttttctgtatcacattaaatttcttgattgttgtttttattaattgattaaatcagccctttccttttttcataccattctataaaatttccaaaaatttctttttcggcaattttccttgcgtctatcgcatcttggaggttatcaaaccttccaagat

SEQ ID NO: 36660 - DNA, 260 bp, Unknown
  Description of Unknown: RightRegion for integrase B10661 sequence
aaattatttgaaaaaatagtatataataaacaagaagaaacaattgaaattacttataaataaaagatttttttattgtataccaaatggacttaattccaatcaatgtcatttggtatacatatataatatagaaagaaaaaacactaaataaaataatttagtgcttctttttgccttaataaaatttctatactgcaatcaagatatgcaaaatattttttacctctttgccttatgtgtataaccttataatcagt

SEQ ID NO: 36661 - DNA, 260 bp, Unknown
  Description of Unknown: RightRegion for integrase B10662 sequence
actatcattgaccacatagaagtagttagtgtggacgatattacaattgcttaccgtagttaattagttgtcggttatgtatagttagctttcccgtactatacataaccgacaaccgaacaaagccagtagaatcaatggtcacgctttaagcggcttcggcaagcgggtaataaacttaccataaccattgttgcattttattaaattcaaactatggtacctttgcaagctcaataagtcttcctccgtaaatggat

SEQ ID NO: 36662 - DNA, 260 bp, Unknown
  Description of Unknown: RightRegion for integrase B10663 sequence
actatcattgaccacatagaagtagttagtgtggacgatattacaattgcttaccgtagttaattagttgtcggttatgtatagttagctttcccgtaccgtacataaccgacatacgaacaaagccagtagaatcaaggcactacattttaagtggcttgggtagatgggtaataaatttaccgtaaccgttattgcacttaataaggtttaggctgtgataccttgccagccccaaaaggtcttcctcggtgaacgga

SEQ ID NO: 36663 - DNA, 260 bp, Unknown
  Description of Unknown: RightRegion for integrase B10664 sequence
aatagagtaataatagacggaaataagaatataactattgaattaaaatatatagaggattaaattcctcttatatttttagggtttatgttggtatatttaagaccatactagcatatactctttatggagcataaaatattgacactaatttaaatcatatgtataataatataaaaataagtaaataatatgtttgttgataaataagggaggtagataccaatgataaatatagaagaatttatagagttaaaagt

SEQ ID NO: 36664 - DNA, 260 bp, Unknown
  Description of Unknown: RightRegion for integrase B10665 sequence
agaacagacggcgaaaagaagccgaaagcctatagtatcagctttgttatttattttaagtagtttctttccaatgtacattcagaaaggcgacggaaaaacgctacgttgccacggcgacacccacagccaaaacgcacaaaacttcccatatattcctttgattgcggagcctattttccgtcttgtcgcgctctttctcgtattcccgaaatgattgcgcggctttctgcaattcttcgttcgctatctgcaacgag

SEQ ID NO: 36665 - DNA, 260 bp, Unknown
  Description of Unknown: RightRegion for integrase B10666 sequence
agaacagacggcgaaaagaagccgaaagcctatagtatcagctttgttatttattttaagtagcgttattacgtcgcacttttgagtgtgcattgtagaaacgctatttataaacggctaaacgaaaacgcccggcaaaacgccggacgcaatctccgctccttgtaacctctttacatgagctaaccaaattatatcatactcaccgcgccacggcaacaccaacggcgacaagacacagaacctcccaaatattgcgc

SEQ ID NO: 36666 - DNA, 260 bp, Unknown
  Description of Unknown: RightRegion for integrase B10667 sequence
tattctcaaaacagtaaatatgaaaggaaaataaagaaacctgaattattagaagtgatttagattaatatctcataagtaattgattatcaatgaaatataaaatattatcttcttatatactttcttaaccaatattcttctttatcctcgtcatatacttcatatccaagtcttttgtaccattcaaattgccattgtctttgtttttcaaccgaaagacatacaatattaaatccttctctcaaagttatttcttc

SEQ ID NO: 36667 - DNA, 260 bp, Unknown
  Description of Unknown: RightRegion for integrase B10668 sequence
agaaataaaaaaggtaatattgatcctgatcttgttaaattaaaaatatatttaaaaatttaatgttggatttttattacattttatattacaattatattaaatttaaataagaagtgttgacttcttattttttttaatatatattataagtaataaatacaataatcattactcaccttattcaatagatgataaatgattattacaataaataagaggacacaaaaccagtgtggaagcaaggggtgttgagagga

SEQ ID NO: 36668 - DNA, 260 bp, Unknown
  Description of Unknown: RightRegion for integrase B10669 sequence
aaaaatacaaggcataatattgaccaaaatttatttgaattagaaatatttttaaaaatttagtacaaactctttactttttattttttttagtataatatttagaaaagtaaagagttatcattgtactggttactcatagagtaagttttgataactccctaaattaaatataagagggtataaaaaaagggcttttaattactgataataattaaaaacccagttgaaagttatcaccactaactcacaaccattta

SEQ ID NO: 36669 - DNA, 260 bp, Unknown
  Description of Unknown: RightRegion for integrase B10670 sequence
tatactaatggaccatcaggtaatcagaaaggttggaaaaataaacaacaaagaaatagttaaggaggaatagaaaatggaagaaagagtaagaaccgttaccgtaatgcctgcaaccttaagggcaaacctatcggagatgatccaaaaggaaaatgtgacatattatgccagagtatccactgatatgaatgaacaagaagagtcatatgaaaaacaaagagaatacttcgaaaactatatcaaactaagacctgagt

SEQ ID NO: 36670 - DNA, 260 bp, Unknown
  Description of Unknown: RightRegion for integrase B10671 sequence
tacgcacctgtcagtccggtgtacctcgacaggacgccagagaagcgattgcagcgagtttgatctgctcctcccgtaggcataccctcgcctccaaaacggctctggagaggtctccgttcgtctcaagaggattggcgggcaattgacagggttcagtcaggatcgccgggatagcgggacactcgaccctcagaaagagcctgtcgcaccccgtcaggcacaggctgaccagcccaatcagcattatgttgcagcgc

SEQ ID NO: 36671 - DNA, 260 bp, Unknown
  Description of Unknown: RightRegion for integrase B10672 sequence
gaaggtaacaggaaggtaaacaacatcacatttactttgggatggctgtatattgcagcataaatttatgtaaaaatggccgacagaggaagttctttcctgtcggctgaattttgtaaaagaaaaaacagcaatccctgccgaacgacaggcagggatttttgctgtgtagagcaatataatagtatctgactttgtcagacccaagtagaattgtagcacattttgtcgactttgtcaagtactttttttcaaattag

SEQ ID NO: 36672 - DNA, 260 bp, Unknown
  Description of Unknown: RightRegion for integrase B10673 sequence
gatttctactttatcaatggcctggtcgtattagtttccaccctctctttcttccttgaatgaacagaaaaaggccctcactaggatatctgcattcctggtgagggcctttgtgttggattttaacaacatacgatattttctatcattctccagacagggccagaaaaacctgttaaaatctatcgaaaaggagaatgacttatgatcaagattttgctttctgcccgcctcggcgaaaagcgggtgagtcaaacgga

SEQ ID NO: 36673 - DNA, 260 bp, Unknown
  Description of Unknown: RightRegion for integrase B10674 sequence
acgtccaccatcagccggatagacgccacgaaaacgcggctcgatgtgtcgtggctcgtgtgacaaatttgtgacgaattatgggacaagtttgtgacaaattagtgacgagttttgtgacaagtttctttcggcttgcgccgcaacaattcgcgcagcagagaacgaaccaaagggaggaattgaaatgatggaaaacgaaaacatctggggccacatgtcaacgattcccatgcagcccctttgttactgctcctctt

SEQ ID NO: 36674 - DNA, 260 bp, Unknown
  Description of Unknown: RightRegion for integrase B10675 sequence
ccgacaagaggtcaagttgcaaacgacaaaccgattgaattaaaaatatatttaaggatttagtaaaatctatttactttttccttaatatatattagtataagtagtgtaatcatttaccgccttttacataaggtagtttatgatagcactataatattaataattggtttttaaagcataaagttttccataataaacataaggtctgtcaagccgacgctaaaaagttgatacgttttcgttgacttaataacgaa

SEQ ID NO: 36675 - DNA, 260 bp, Unknown
  Description of Unknown: RightRegion for integrase B10676 sequence
cggcacgccggcatccgggtagagtgcgaagatcgccacgtcgtggccatccgcatagagtagcgggacaaaaacggcacgggaacgcgcttcatgtccccagaagaggtcccgtgtagcgttgtttcccaacaacgctacacgggaccgaccagataggcccttgacagggagtatgaatctggagtatactcgaaccaactagaaccggcgccatcattgcccgtgatggcgctttcatccaaaatcgaagagcccac

SEQ ID NO: 36676 - DNA, 260 bp, Unknown
  Description of Unknown: RightRegion for integrase B10677 sequence
tcaacggaaggttctggccgctgtagcttcggcagaaccatcgctatccaggtggccgcgtgagggccggtgactgcctttgtgtgaagttcgcacccgccccctttgacctcgctaacttggcggaacgactcgtctcgctagtccggttagcgccggctgagtgccccgttttcgctaaaaccctgggagatccagagtgagatgggtgctctcgcaccgcgccgaccggcaggcactcccgctcgcggaccggcact

SEQ ID NO: 36677 - DNA, 260 bp, Unknown
  Description of Unknown: RightRegion for integrase B10678 sequence
cgcatcgagtacgagaaagaccccgagtcgggttctctccggctcagggtcttcttcaggtaatcccagttgaacgcttaattacgtcagctggcaaatatctcgattgtgtcccactcttataattaagctagagcttcttcgcgatggcgtcgagcttcttcatcatagcggcctggttcgcctcgatggcgtgcatgcgctggtcgatgtagccgatgcgctcgcccagcttcgccgtgtgcttgacctccttgcct

SEQ ID NO: 36678 - DNA, 260 bp, Unknown
  Description of Unknown: RightRegion for integrase B10679 sequence
cagctgatcaaccgtattgaaattgatggtgatgacatcactattcactggaattttgtatagaaaaagcgtacctgattagatacgctttataaaatcatgatttgaataccaacatgtactattcgctttagcgaagtgtccatgttggtatttatttttattcctcattatcaatgaactgatatacaacgaaggtaacaacagtatcaggttcttcaattggtgtttcaagtgttatgtaattgttgctgatggtg

SEQ ID NO: 36679 - DNA, 260 bp, Unknown
  Description of Unknown: RightRegion for integrase B10680 sequence
tcaacaagaggtcaaatagcaaacgacaaaccgattgaattaaaaatatatttaaggatttagtaaaatgtatttactttttccttaatatatattagtataagtagtgtcatcatttactgccttttacataaggtagtttatgatagcactataatattaataattggtttttaaagcatacagtttaccattaataaacataaggtcttgttgagccgacgcacaaagtcaacacggtgctaaatgtatttcaccta

SEQ ID NO: 36680 - DNA, 256 bp, Unknown
  Description of Unknown: RightRegion for integrase B10681 sequence
atggataagtcagcgaccttaaccctaaacctaacccaaaattggcttttaatcccggcatgaggcctcctttacaacattttgcacaaatagcagcactctaatttgtgcaagtatacaaaaatactcattgagtgcattttttatcaaaaaacgcttgacttttgtactcaatgggtgtatactataatcaaggcaagagaaaaacgccgaaaaaggcaggcgtttgtaattgctaaataaataatgaaagagg

SEQ ID NO: 36681 - DNA, 260 bp, Unknown
  Description of Unknown: RightRegion for integrase B10682 sequence
ttaagttttgttaaaagcgtaacgattgataaaaacaataatatcaacattacctttggttaattgcatatcaaatggtatactacgctacagcattattgcccgcaagcaaacccgtaataatggcttcggtatgcccaactacgattgctgctttttctccaccacaaaatagattttccgccccttctacttgtagagtatgattacatggagcaatgcctagatagcgcatagaattaccaagactacccgcatag

SEQ ID NO: 36682 - DNA, 260 bp, Unknown
  Description of Unknown: RightRegion for integrase B10683 sequence
tcaggaagtccatgcttacacaaagtcatttatatgtcaggctggttatttgttgccgcctgaaaattgaaaaccaataaaaaaattcggtagaaatcaaagttctgccggatttttcattgatattccgataaaaacaacagggctattaccctgtttgaattcgcattgttcagtatttgccctgaccccggtcacttccgaaaacagtgacagcgattttcaatccccccgcatatttttattcaataatcttccag

SEQ ID NO: 36683 - DNA, 260 bp, Unknown
  Description of Unknown: RightRegion for integrase B10684 sequence
ttcataagcaaagcactatacaattcaaagacaaaaaccctgaccgttttttattatgcctaaaaattataacaaacagcaatacagtccgccgtactgttattcgttgttattggtgataaagtcaaattttaagtgatttgcaacagatacaaaaacagggagagcaaatagctctcccctttttatttatttctttacctcaacatattttttgttaagactaatatatccagcaccgctttagatttatgacgcct

SEQ ID NO: 36684 - DNA, 260 bp, Unknown
  Description of Unknown: RightRegion for integrase B10685 sequence
gctttgattaagattattcgggttttccctaaaggaaatgttgaaatagactataacttttaaggtaagggtatgagtaaatcattgcaaaagagagccaaacttattgatgtaatgctcctagttgcaaaatcccacctaagtaaatatgcgacaaacaattaaatacatggatgacgtaaacgaaggcgattggtacgaataccagtacgaatacccagacacgcttgatctccttaagatttttccagaggtgaaag

SEQ ID NO: 36685 - DNA, 260 bp, Unknown
  Description of Unknown: RightRegion for integrase B10686 sequence
gagggcggcatgggggcgcgcaagatcgcgccggggcgtgtgacgtacgagtggctgcgttaggcgccgtggcggtcgcggcgccccgagcgttcttcagcgctggccagccgcagcacgcggccctgcgacgcggcgccggtctgtccgctgagcgctgcggcctgcgcggcgagcgagacgaggtgcgcgcgttctgtgccgagttcgccggcgccggcgccgtagagggtacgacggcgcgactcggcgtcgcgtgc

SEQ ID NO: 36686 - DNA, 260 bp, Unknown
  Description of Unknown: RightRegion for integrase B10687 sequence
agattatttgatcatatcacttataataaaaaagaaaatacccttgaaatcgtttataaataaagcgattattatttgtactttatcagtataccttttggacttattccctattagttccatttggtatactaatataaaattcctttcaaataaaaaagaactagagttataaaaaccctagtttttctttccttattatatagtagtcttatttgattactattttttgaccaacatatattaaatttggattagcg

SEQ ID NO: 36687 - DNA, 224 bp, Unknown
  Description of Unknown: RightRegion for integrase B10688 sequence
agattatttgatcatatcacttataacaaaaaagaaaatacccttgaaatcgtttataaataaagcgattattatttgtactttatcagtataccttttggacttattcccgacaatatcacctttatggcaatattcactagtattttcagctattgtatcaaaagcaatacaatcaacaaaatcagtatcataaattccttcactatttttaaagcttcttg

SEQ ID NO: 36688 - DNA, 260 bp, Unknown
  Description of Unknown: RightRegion for integrase B10689 sequence
atcgattacttcagggaatcggcagcagagcctccgaggctttttatttatcctaaacagtgatatcaatttagtacggtttcaactgtcttatgatgatatacaggttttcttctcctctcgctgtgctcgttcgcgccgtatgccatttaaaagcgtttaaatgcccctaaaacgaattatgccccgcaggcggtgtcgttctccatttgcggggctaattttgttctgaggcctttaaaacggtttaagcaaaaaag

SEQ ID NO: 36689 - DNA, 260 bp, Unknown
  Description of Unknown: RightRegion for integrase B10690 sequence
agaatatttgaaaaaatagtatataacaaaaaagaagaaagcattgaaatcacttataaataaagggaattttattttgtatcatttttggtcttgattgcaattaagtccatttggtatataaatacataaaaaagaactagagttataaaaaagccttcacctgcaccagattgaaactataaatccttgaaattcaaggctttttctttattttcaagggattgcgtatgattgtttagtgtgttttgtgtgactat

SEQ ID NO: 36690 - DNA, 260 bp, Unknown
  Description of Unknown: RightRegion for integrase B10691 sequence
ccggcgcggcagcgcggcaagtgggacccgtcgcgcgtcacgctgacgttgaccgccgggtaggacgccgccggcgccgtttacacgcctcgaagagcccttctccacgccggagaggggctcttcggcgtctccaggtgtgacgttgtgacggttcttacgtcactccccgttagtgctatagacgactcctctctatagagagaactagaggggtcaccacttccgccacttcgccacgcgaagaccactcccctctt

SEQ ID NO: 36691 - DNA, 260 bp, Unknown
  Description of Unknown: RightRegion for integrase B10692 sequence
tgcgataagataatctttcataaacacgatagcagccttgagctgtttttaattgatcagtaagcctataccctaatgaagtatggaggtgcagatggcgagttgggtgcctccctgcggtatctcagccagaaatttacgatggtaacgcctgaggcaaaggcaacgctgaatgacattgctacagaggaatatgtgtgttacatctatcaattattccattcatacagcagaatcagaaaataaaaaccccatccttg

SEQ ID NO: 36692 - DNA, 260 bp, Unknown
  Description of Unknown: RightRegion for integrase B10693 sequence
gaaaccgttatctgggacaaggcgaccgaaacccttacgatcacataccgcgtttttatttaaccctgttttattgcctgatggagtacggaggtccatacaccaacagactatcatttcactatcacagcatactccctcatgccgcccgcaacaagcaggcggctttttctgctgctttgggatgtcgtccctgcaatatgaaggataccgctcataaaataggcgcgcccgatttcccggacgcgccccgcctgtct

SEQ ID NO: 36693 - DNA, 260 bp, Unknown; identical to SEQ ID NO: 35864
  Description of Unknown: RightRegion for integrase B10694 sequence

SEQ ID NO: 36694 - DNA, 260 bp, Unknown
  Description of Unknown: RightRegion for integrase B10695 sequence
actagaaaagttagaaatgaaccagatatttttgatgttgaagtagatataaaatatatttagaaagttagtgttgactttctaatttttttaatttaatatgtaattaaattagttatcatataacctttgatgtatagatggtttaatgataactgttatctaacagttgaagctatgaaactttaaaccgaagagtttggccaagctcatgcatagaattggctcggtgcaactggattccttcaagtccttttcat

SEQ ID NO: 36695 - DNA, 62 bp, Unknown
  Description of Unknown: RightRegion for integrase B10696 sequence
attgttgacaaagttgtctttgaccgcaaaacgtcaagcattgagatgtattacctgtgctg

SEQ ID NO: 36696 - DNA, 260 bp, Unknown
  Description of Unknown: RightRegion for integrase B10697 sequence
cgcatcacatgggacaaggcgcagaacctcctgaccatccactaccggctcatgctggaataatttttgcccataatcgtagtctgttaccatccggtggcccggacaccaacagactatgaaatgggcgcgttttcctaagttgaaatttcacaaaaggggtttacaaatacatttttgcgtaatatactatgactaccgagagcgaaagctcccggtcagatagaattgacgtccgtcaatcaccatctgccctaaag

SEQ ID NO: 36697 - DNA, 260 bp, Unknown
  Description of Unknown: RightRegion for integrase B10698 sequence
gactcctgcacctggcagaaatcgaccaaaacgcttgaaataacctacagggtttttctttgactctatattattgtctgttggagtatggcccgccgtactccaatagacgatgaattatcttttctattttttcaaattcctcttgacattatttttattctgctgtactcttgaaaaaatgcacaccaaaattcttttatattgcggatgagattcttgtttggaggacgccccgtggaaaaagaacgtttctttca

SEQ ID NO: 36698 - DNA, 260 bp, Unknown
  Description of Unknown: RightRegion for integrase B10699 sequence
tctctgatcagaaagatagtgctcgacggagacaacatagagatttactggaattttacgtaatcattcctacgtaacacgtatgtattagcaaaggttatctgttggaatgatttaatgatgatggtataatgtaactgatcaatgatttcccctttttcctcctggcctcctccctttgggccgggaggtttttcgttgcttttcatatcaacggcgccgccgcgatcacggtctgtaagatggccgaagagctcgac

SEQ ID NO: 36699 - DNA, 260 bp, Unknown
  Description of Unknown: RightRegion for integrase B10700 sequence
ggaacaagtgatacccaaaacaaagctatccaaatgtccggctggctcctgattgcagcctgactaaaagtataaaaagcaaagcccggacggtcaaaacgacctgtccgggctctcatttttatctccgaacccccgtcacatcaaaccaagtccctccaatacaaagctcccccgtaatgatctcccccggcgtttccgggggtgtttcctgctccggcatcggcggattcggcagcacctcaccggtgccggacccc

SEQ ID NO: 36700 - DNA, 260 bp, Unknown
  Description of Unknown: RightRegion for integrase B10701 sequence
ggcgtcaaggtatatgtcgaaaaccgcgagatagtcagaatcacctttggtgagttgtcctaaacatcacggtttctcgataccacgatattgagtacctttttgcattctccgaaagtctcacaatcctcttaacatcctctggactagacataactacccaaaatttccactttaggcacaatctaggcccagttacttgacacggccatgagggtgtggtattatgtaacttgtggcatagttaacataatgcgccg

SEQ ID NO: 36701 - DNA, 260 bp, Unknown
  Description of Unknown: RightRegion for integrase B10702 sequence
gtagacggaagtgacgggtttcagcacatcactcgtggtatcgcagcctataaactgccgtaaaagcgccccttttttgtgacagcgattatacctatgaaaaacttaaaacccgccgcaatcacggcaaccttagtcgccctgctcgttggatgcgtagcagcaacccgcgcaccagcgcaaatcgaaaattgcaaacccgtgccacgcactcatcatagcgcctgcgtgtggacgattgacgaaacaacgcactttat

SEQ ID NO: 36702 - DNA, 260 bp, Unknown; identical to SEQ ID NO: 35849
  Description of Unknown: RightRegion for integrase B10703 sequence

SEQ ID NO: 36703 - DNA, 260 bp, Unknown
  Description of Unknown: RightRegion for integrase B10704 sequence
gaattatttgataaaatagtttatgataaaaagaatgagaaacttataatcacctataaataaaggttttattaatttgcatatatgaggaagttaatcccgaacaaattctttatatatgcactatataatatagaaaggaatattatgaattattgcatatatttaaaaaaaagaaaagaaaaaccattttgtaaattattaaataaagaaatattgctttcctgttgtcaggaatgtggtaataaaaagtataaaac

SEQ ID NO: 36704 - DNA, 260 bp, Unknown
  Description of Unknown: RightRegion for integrase B10705 sequence
tccctgattgacagtatagtcgcattcccggatcatatagaaatacactggtcatttgcatgaccgcaaaaaagaaaggccccgcggtgatcttccgcgaggcctttctcatatttgtttatatttattgatatctgttgatattacatcatgccgcccatgccttggtttgggacgttaacatttgcaggctctttaatgtcagcaaatgttaacggctttcttccttattaaaatctatccggacaactctctccagc

SEQ ID NO: 36705 - DNA, 260 bp, Unknown
  Description of Unknown: RightRegion for integrase B10706 sequence
ctgatcgataagatagtcgcttatccagatcacatagagatccactggtcatttgccggatgacataaataaaagcctcacggtggttatttccgtgaggctttttacttactgatatttattgatatttattgatatttggtgatgtttttaaaatttgtcaagatttgcggtcgcctcaatgccggcaaatgttgacagatttttattctttttcgaaatcttcgcgaactacacgctccaggagctcaagcagatag

SEQ ID NO: 36706 - DNA, 260 bp, Unknown; identical to SEQ ID NO: 36000
  Description of Unknown: RightRegion for integrase B10707 sequence

SEQ ID NO: 36707 - DNA, 260 bp, Unknown
  Description of Unknown: RightRegion for integrase B10708 sequence
gtctttgacaacaagaagacccgattcgatgcgaaccgggttgagattgcttggaaggtttagatgtgcgggatgtattcggtcatagaaggctagccgccttctttagcgctgctttgctcttgaccttcaaagggacgccgctctttgcggttgattccttcagataagtcttcatatcagcgctattcatgtgtgcatctattttacctcataagccattgactttaaatagcaattcttcatactcagggcagata

SEQ ID NO: 36708 - DNA, 260 bp, Unknown
  Description of Unknown: RightRegion for integrase B10709 sequence
acactgatcgaaaagatcgagatcgacgacgagcttgtcgaaatacactggaatttcgtctaaacccttgatataccggcgtttttattattataccccctaacggacgccggttttaactgtcgtcctttagggagcaaaaattattaagtgaggttttataaatgtataacataaaagtaaagaaaatgatagaagatattagagacgcgcttatcctggaacatggatataactttttaaagctctccgtaaaggat

SEQ ID NO: 36709 - DNA, 260 bp, Unknown
  Description of Unknown: RightRegion for integrase B10710 sequence
gataaaattgtatatgataaaaaaggtggggcattgttgatgtatttttatattaacgactaacaccaaattgcccgcaatccctttatttatcggtgtttcagggcatcgttatacgttatagcagtatggcggaggatattgcaataacgtatgacggtttttatatagaagaaagtggtgattttttatagaaatttagggaaataatcttagattttaaatgttttataaaaaaattcgggagcacccacaacaaa

SEQ ID NO: 36710 - DNA, 260 bp, Unknown
  Description of Unknown: RightRegion for integrase B10711 sequence
aagaacaattcacaccataaaaaccttgacgacgcaaatgtggagattttcctcaaaatatagttgcaattcaatcggggtgctgttattattgtgttatggtaaacaacgcccttccgattgataggttgtgcaatgtttaccatagcaataatgcgtaacagccttaattttggctattatgtaaatagaaatttatggtaaaacggtgtataatagtattacaaagttccgagtgagttgagccgaatgcgagttca

SEQ ID NO: 36711 - DNA, 260 bp, Unknown
  Description of Unknown: RightRegion for integrase B10712 sequence
acactaattaaaaagatcgttatagacggcgaggacgttactatctattggaatttccaataggtagttattgtctactaaatacggacaaccatcaatatagttgtccctacttagatgatacactaaaacgagaccgaggttaatactagcctcggtttttcttattttaaaaattttaaaaaagtttaaaatagggtattgactttatacacctacgggtgtatatttatattaacaaataaatcacacatacacac

SEQ ID NO: 36712 - DNA, 260 bp, Unknown
  Description of Unknown: RightRegion for integrase B10713 sequence
gacacctgcactttcgataagcaaaacatgcttctttccattgtataccgctatgaaatctgacttttttctccatacctaaaattgtagtctattgacgtccggaggtccagataccagaagcctacaattccaccgcaaatgaaaacgcgcagcgaacttaaccgctgcgcgtttcccatattttcgtgtcatatctcattcacggcgcatgtaccgatccgttcggagcgctgctacaatcgaaaaatttcgctttc

SEQ ID NO: 36713 - DNA, 260 bp, Unknown
  Description of Unknown: RightRegion for integrase B10714 sequence
cagctgatcaacaaaatagtgattgataacgatgaaatcactattcattggaattttgcatagaaaaaagcgcacctttaaaggtacgcttatcattaaacccatcataccatgatgtgatgttaactaaaatgaatgccacatcatggtatggtcaatctgattcagtttctgcagtggctttatagactacaaaagtaatcacagtaccagcttctgcaatcggtttcttaagtgtcacaatgtagttacccagcaca

SEQ ID NO: 36714 - DNA, 260 bp, Unknown
  Description of Unknown: RightRegion for integrase B10715 sequence
acggaagaaatgaaacaaaaagcaaaggaaaggagtttacaatggcacgaaaaatcacaatgattccgcagaccattaatccgcagacacgaacggcaatggatacgagaacaaaacgaaaagtagcaggttacgcccgtgtttcaacggattatgaggaacagattacttcctacgaggcacaggttgatcattacacaaattacattcaaagtcgtgatgactgggagtttgtcaaggtctatacagacgcaggcata

SEQ ID NO: 36715 - DNA, 260 bp, Unknown
  Description of Unknown: RightRegion for integrase B10716 sequence
gtggttcgaccagtcgatggaccggtggaggtacgggtggagccggtcgtggacttggagtgactcagggtcacatccctgggtcgtgtcctgtcgctggacgacacggcggcgagggatgcatttgacctaccgaaccaggatcggccgctaccctgcggccaccatcgcacggggagaacgcatgaagcgcacagcactcgtcttggccgccgcctgtctcgcgttggccggatgcggcggcggtgacggcgttgcgg

SEQ ID NO: 36716 - DNA, 260 bp, Unknown
  Description of Unknown: RightRegion for integrase B10717 sequence
catcccgccgtgcccccgaagaacgtgttcaacagggcgagggtggagatccgttggcgttagccagcaccgccctccaacttgccctcgtgctcttcctacggtgcttcctcgtcctcaacctgctttccgccggagggccccgcctcgcctggtgacgcagaattgcccttcgggcccgtcggaccctcggggcctgtaggccctggggcacctggcggtcctgggggcgaatactcaagggcttctctggccgtgtt

SEQ ID NO: 36717 - DNA, 260 bp, Unknown
  Description of Unknown: RightRegion for integrase B10718 sequence
aaaccgataaaagacaggaacgagggaaaatgtgaagtgcaaaatatcgaatttaatttatagggggcgtttatgatacgcaattttgacttgttttgttcggataaatgcggcgaaccgctaaacaaaatttacaaagaaaaacggacgataacaagcacaagcgaattaaaagccgccgtcacattcgaccatgtggcggcggcatataaaaagaacatgagaaaaaacgaaaattacatacaatcgaattgcgttat

SEQ ID NO: 36718 - DNA, 62 bp, Unknown
  Description of Unknown: RightRegion for integrase B10719 sequence
aaggtttttgtaaaatcaggatatattaaaatagagtggaaaattcctttcaaaaaaatgtg

SEQ ID NO: 36719 - DNA, 87 bp, Unknown
  Description of Unknown: RightRegion for integrase B10720 sequence
aaggtttttgtaaaatcaggatatattaaaatagagtggaaaattcctttcaaaaaaatgtgagttttaggtaccaagcattctaaa

SEQ ID NO: 36720 - DNA, 260 bp, Unknown
  Description of Unknown: RightRegion for integrase B10721 sequence
tgggtcggcgagtcggagacgtggggcgagcagtgggagcgggagggcctcgaaaggccctgactgccgctgtcagctggcgctgcgtttcccaccgttgccggctttgcgtgcttcggcgcggacccagcgcaggtatgagagcgcctcttcgcgtttgctggacgggagggcggggtcggcgaggatttccagggcttcggcgacttcggtcgtgtaggtgattccgaggccgctggtgccggtgaggtcgtcgtcgg

SEQ ID NO: 36721 - DNA, 260 bp, Unknown
  Description of Unknown: RightRegion for integrase B10722 sequence
gcactaataaagaaaataataatcaccggcgacgatattacaatccattggaatttcgcttaaagccttgattttaaaggctttttaatttgccgactcaataacaccctttagatacaatgttcttagtcattgtttctaattggcgttatatatctattcgataccgaggagtaatatcctcggttttcttttgaaaaattttttctgaaaattataaaaacttgatatgtatcatttacatatacgcttacacgcgt

SEQ ID NO: 36722 - DNA, 260 bp, Unknown
  Description of Unknown: RightRegion for integrase B10723 sequence
gcctgtaaggcagaattgcagcacatcccttttgttgaagacctgatttcggagacggcatgagtatccgccatcggaagcggaagaccactggagatctctatccggatcttggagaaggacattggcaagatggatgatcacggatcaacgacagatccgctcgacggctgatggcggaatgtgccaccgtccctgaattttcttcgcgcctctcaactcttgagtgtggcaccattcacggacggttttttctgtaa

SEQ ID NO: 36723 - DNA, 260 bp, Unknown
  Description of Unknown: RightRegion for integrase B10724 sequence
gtgtcggcttgtggcatcttcgcaaccctacacaaaacaaccctgataataatagccgcctgatcagaggaccttaataaacgcccccggaaaatccttccgcaccgtttcaaggtacttttcggcgttttcccgtgaagcaaatgcaccgacctgtacataatacaaagcggcaggatcaccgccgagagcagctttgaatttctgccattccgattccgagccgctttcggcgttccatccgacgatccccggacacg

SEQ ID NO: 36724 - DNA, 260 bp, Unknown
  Description of Unknown: RightRegion for integrase B10725 sequence
atcgagtacatcgaggtcttccccgatcacatcgcgatacactggctcttctcggcacaatgaaaaaggccccgcgggatctctcccgtggggtctttgagttatgacatttttggaacgttattccagttttgtcaggggttccggatcaatagtccatcccggctcctgcgccgccgttctgcggtacagggtttgcaggttccttgatatctgcaaaccatgtacagtcaacttatgtcttatctacataatatagt

SEQ ID NO: 36725 - DNA, 260 bp, Unknown
  Description of Unknown: RightRegion for integrase B10726 sequence
ccgctcccgctccgcgtcatcgaactgcccgacggtgacgacccacgtgtgctcggggtgtagctcgctgagcatgtgctcccacgtccgcgcggcgttcgcgagcgcatcatccaggaggctcacgccgccgcctcctcggccgcggtctcctcgccgtacaaccgcgcgagcgtcgtcaacgtctcccccgtcgcctccgacaacgccgtggcctgggtggcttccgcggtgaggtcccggacgctgcgctcgctgct

SEQ ID NO: 36726 - DNA, 260 bp, Unknown
  Description of Unknown: RightRegion for integrase B10727 sequence
gtaaaaaaaatcacgctggacggggagaacgtggacatagaatgggcatttctggacgattaagcggattttttggcggtttattgccctttcggggctttaaagccatgaattacccttgtgaacggcacaaaaataccccgcctatgcggggttccttcccatcatcggaagcctcaatggctcagggctatctgccatgccgccatcggcctgcgtctcttcggcacgagcgggacggacgggcgggggctttcgct

SEQ ID NO: 36727 - DNA, 260 bp, Unknown
  Description of Unknown: RightRegion for integrase B10728 sequence
agcattatagaaagcatcaccgtcaaggatggatcaggagtcagtattgttttcaggcgctaatttttatctccagccggatgtttagggatgataacgtccggctggagatgtaaattacaaatcagatatggtataataaagacagaacgaacaacggcccgtctcatgcgctttaacggtcacgctatgtcgtggtttagtatgagaggggtaaaaaaagcgccttcgcgggcgctcttttcattccactccaatta

SEQ ID NO: 36728 - DNA, 260 bp, Unknown
  Description of Unknown: RightRegion for integrase B10729 sequence
ccctaccgtgcgggcgttacggggcgtaatcgcatttcgatcatcggggcggatttgcgatgatgtcagaaaacgaattcgtaatgaatcgcattttgctccgactcggaaaagcgattgccgcattgcaagcgatggaactaacgcccgagcaaatcgaggcggttaccgaaatcgataagcattatgcggcggcggttaattggaccgtcaaattgagcgagcaatcggggaataactttcccggctcgaatgttgta

SEQ ID NO: 36729 - DNA, 260 bp, Unknown
  Description of Unknown: RightRegion for integrase B10730 sequence
tactttaggacggactcgactaggtacgctccttttaatctaaaaatttatttaaaaatatagttgataagttagcgctttatatgataatatttatactgttatcatataagagcggacttatccgttattagatggtaatagacaatttaatatttagctcttacttagagctaggaggcttgattaccgactaaaagccgccttaacaaataaatcgagagtttagcgtagcttgtgacggtgaaaaatgcgctcgg

SEQ ID NO: 36730 - DNA, 260 bp, Unknown
  Description of Unknown: RightRegion for integrase B10731 sequence
ccgaacccaatatttttcgtgaaacacgttttcggatttgttttaatagtagaggaggtctaacttcggttaggcttcctctttgtgcgtttgagccaatttcaactccaacacagcggcttcgataaggttctcgatttcttccatattcagcgtaaaaccttttcgattgaggaaagccataacatactttttcttctcctcacctctgcctgtgccgacataaatcatttctgccgcttcgacagcgatatttaccc

SEQ ID NO: 36731 - DNA, 260 bp, Unknown
  Description of Unknown: RightRegion for integrase B10732 sequence
gccaatcacaagcaccattctggaagggacgacgcaagtgtggaaatatttttaaaaatatagttgactgctcaaaaggcatatgctattcttggattatcaagcgatatcatatgccttcttatttatccgaaggaaattgatgttacatgactatacaaaaacaaagctgatattttatcatattttggttattttgtaaatagaaattttggtgaaaacggtgtataatagtattacaaagttccgagtgagttgag

SEQ ID NO: 36732 - DNA, 185 bp, Unknown
  Description of Unknown: RightRegion for integrase B10733 sequence
ttagtaaagaaggtgtccgttacccttgaagaccgtgtgtctattgagttcttcgaggattaatctatatcatgttgtaagaattgctttcgcattatttgtcggcatactataccgctgattgagataccggagcgaagccgacaattcaccgtcaggaccaccatattgggtaataactaact

SEQ ID NO: 36733 - DNA, 89 bp, Unknown
  Description of Unknown: RightRegion for integrase B10734 sequence
cgattattgtttgagcgaatagaaattgaaaacgaatcaataagcgtagttgttaaaggatagtttagcgccttagtacattatcggat

SEQ ID NO: 36734 - DNA, 260 bp, Unknown
  Description of Unknown: RightRegion for integrase B10735 sequence
  modified_base (87)..(87): a, c, t, g, unknown or other
  modified_base (167)..(260): a, c, t, g, unknown or other
agagggcttataaataaggtcagagtaacagctgaggatattgttatcaattggaaaatataaataattttagtaacctacatttcnttacgattggctcctccgtttttatcatggtattctttataagccttagcctgttcttctgtgattcgcccatctgcttnnnnnnnnnnnnnnnnnnnnnnnnnnnnnnnnnnnnnnnnnnnnnnnnnnnnnnnnnnnnnnnnnnnnnnnnnnnnnnnnnnnnnnnnnnnnnn

SEQ ID NO: 36735 - DNA, 85 bp, Unknown
  Description of Unknown: RightRegion for integrase B10736 sequence
agagggcttataaacaaggttcaggtaacagctgaggacattgtcatcaagtggaaaatataagtaattttagtaaccctcatct

SEQ ID NO: 36736 - DNA, 260 bp, Unknown
  Description of Unknown: RightRegion for integrase B10737 sequence
ttgtatacacttgacatagagactagaaagaagatttgcactatgtcttctagactagcttgaacttctttctaacccataacactaccaaaccaaccaaaccaagtgttgacagtattgcccaaagccaaattggccaagcagcattctttgtcttgacaacctcaattggatatggttctggaactttctcatatacaattgagtctctgactttctcaacttcaatgtatttgtatatgacttgctgtttgtttgat

SEQ ID NO: 36737 - DNA, 260 bp, Unknown
  Description of Unknown: RightRegion for integrase B10738 sequence
gaccgctgcacgttcgacaaatcccagatgctcctcgcgatctcttataaattcattttctgatgccttaattgtagcaagatggagtatggcccaccatactccatcttgctacaatatttgaaatcactttctcagcacaatcccatgataatacccggccatcttcgcctccgcccctccggcatccttatccatgagaaacgcttttgcaaggtcggcatagaattctggccggtcgaggccgtatttcgccgcca

SEQ ID NO: 36738 - DNA, 260 bp, Unknown
  Description of Unknown: RightRegion for integrase B10739 sequence
gaggaaattcaagtggtctggtcgaaggataaaaaggagatcaaggacatcatatttttttgaaattgtagttgtacataatttctgtaccgaacggcgcagaaattaaatacaaacaaaatggcggcttcggtcgccgtttttctttgaagaaaatagtcagaaaattcaaaatacttgttgacaatataccgcaagcggtatataatagttacgtaatcaaggaggggccgcaggcggaataagccgccgggcatagg

SEQ ID NO: 36739 - DNA, 59 bp, Unknown
  Description of Unknown: RightRegion for integrase B10740 sequence
gtcaaggcagtttacctttgggatgataagataagaatagactactattacacaggaaa

SEQ ID NO: 36740 - DNA, 260 bp, Unknown
  Description of Unknown: RightRegion for integrase B10741 sequence
ccgaacaccttatttttcgtgaaacactgtttcggatttgttttcatagtagaggaagtctgacttcggttaggcttcctttttctgttccagcttgagttccataacagccgcttcaatgaggttttcaatctctgctacattaagagtgaatcccttgctgttgaggaactggacaacatactctttcttctcctgtcctctgccagtaccgacataaatcatttctgccgcttcgacagcgatgtttacccaaaact

SEQ ID NO: 36741 - DNA, 89 bp, Unknown
  Description of Unknown: RightRegion for integrase B10742 sequence
ttcattgacaaaatcgtatttaaccgctccgattgcaccgttcggattttttattttatatagtattatcataaggtggggtatgcagg

SEQ ID NO: 36742 - DNA, 260 bp, Unknown
  Description of Unknown: RightRegion for integrase B10743 sequence
cagtcaatcgagattaattggaccaccgaaacaaaagaaatcgttagagttaattttttttagctctaacgtagtgctattaccttgttgccattcggccacacggtgttagtacaataataaccgagaggatgataccaaatgaaaacagcagaagaaatcatcgcctatcttgaggcggagcttaacgaggccattgaccttcacgacgaggcgaaagagaaaaaggatatggcgcaagcacacgcaactctattaaa

SEQ ID NO: 36743 - DNA, 260 bp, Unknown
  Description of Unknown: RightRegion for integrase B10744 sequence
caacagatcgtaatattaaagactggtgactcatgggaaatagtcaaaaccatactatcttgactgtacttgcgtagtaacaagccagcctgtataaacgtagataccgttaatatgtccgttataacaaaaatagccccccaataaaggagggctcttcgtcatgctgatttgttcggctggttataatcaagcaccgccttttcaatcgcggatttgatctcctggggctccacctttatgcctgcgttacccagcag

SEQ ID NO: 36744 - DNA, 260 bp, Unknown
  Description of Unknown: RightRegion for integrase B10745 sequence
atcattgacaagatcgtttttaacaaggcgggcggcacgttcgactttttctttttgccttagttatatcttttgtagatttggcttaccgattcttcaaaagatatacaagcggacgcaaaaaagcgcccgcttgatttttgaatacatttgtgttcaattctccctcttttcgccgtcagcgcagaaccagtcagcacgagtcgcagtccataccattggacagaaatgtccatactctttcccacagttaggcgccc

SEQ ID NO: 36745 - DNA, 260 bp, Unknown
  Description of Unknown: RightRegion for integrase B10746 sequence
ggtgaccttatagaaaagatagagatagataatgatgatataacaatacactggaatttttaacgccctattttactcaatatgtaccaagccctttaacgcttcccacatattgagtaaaagacatataccacctacagagccagcctctgaggtggtctttttaatattatgtaaacctactattacacttgacagattacagataaactactatatattattttttatatcaaaaacatcacaaatttttaatgttt

SEQ ID NO: 36746 - DNA, 260 bp, Unknown
  Description of Unknown: RightRegion for integrase B10747 sequence
ctgattgaagagtttgcgcaggacagcatcggcgccgaactggtcgaaatggaggaggcatgaattccaacagtccaaccgaccagacgaccttcgtgccgctgaatttgaaacggcgggcgggcagattgatcacggacacgggtgcaccggctcatgacgtcaacatcctcaacgtcgtcggtcgtgggttcttttggcaagacctgctggacaccggcgtgtacgccagtggttctgaccttgccaaggttgagggc

SEQ ID NO: 36747 - DNA, 260 bp, Unknown
  Description of Unknown: RightRegion for integrase B10748 sequence
tacgacatcgcagaacctaatcgcctcaatcgatcaacgtctcaattgactgcggctggataaaccatagtccgccgatcttctttgagccttccagttctcccctgcggcacatgccgataatggttcttgccgtgaccgcaaagccagaggcggagagcttcatggcggcttctttgggggatattttatgcccaggcttgctggatgttcgtaacatggttggtcctccagacttagtgtgactcctcatttatcgt

SEQ ID NO: 36748 - DNA, 260 bp, Unknown
  Description of Unknown: RightRegion for integrase B10749 sequence
ttcattgataaaatcgtctttaaccgctccgattgtaccgttcggattttttatttcatatagcattatcataaggtggagtatgcaggtgcatagtccgctttctgataatgaaattctatgcacataaaaagctccccaaggaattaagtcctcggggagaaaattttattccgctaacctctcaaaagtattcttatcagcaattcctgttactgacaagtccttgacagtttggaaggttttaactgcgctctcgg

SEQ ID NO: 36749 - DNA, 87 bp, Unknown
  Description of Unknown: RightRegion for integrase B10750 sequence
agaaggcttataaacaaggttaaggtgacagctgaggacattgttatcaattggaaaatataaataattttagtaacctacatttca

SEQ ID NO: 36750 - DNA, 87 bp, Unknown
  Description of Unknown: RightRegion for integrase B10751 sequence
agaaggcttataaacaaggttaaggtgacagctgaggacattgttatcaattggaaaatataaataattttagtaacctacatttcc

SEQ ID NO: 36751 - DNA, 260 bp, Unknown
  Description of Unknown: RightRegion for integrase B10752 sequence
gaccgctgcacgttcgacaaatcccagatgctcctcgcgatctcttataaattcattttctgatgctctttattgtagcaagatggagtatggcccaccatactccatcttgctataatatttgaaatcactttctcagcacaatcccatgataatacccagccattttttcttccggccctccggcgtccttgtctattaggaaggcttttgcaagatcggcatagaattctggccggtcaagtccgtacttggcagct

SEQ ID NO: 36752 - DNA, 87 bp, Unknown; identical to SEQ ID NO: 36750
  Description of Unknown: RightRegion for integrase B10753 sequence

SEQ ID NO: 36753 - DNA, 260 bp, Unknown
  Description of Unknown: RightRegion for integrase B10754 sequence
aatttatttgaaaaaataacttattacaaagaaagcaatacccttgctattacttataaataaagggtttattagtttgcatatatgaggaagttagtcccgaacaaattctttatatatgcactacataatatagaaaggaattgtaaaaatgaaatcaaaaagaacaaaagcaactgatatatctatgtcagtaaaaaagaaagtatttgaaagagataaaggtaaatgtgttatatgtggtaacatgataaatgtaa

SEQ ID NO: 36754 - DNA, 260 bp, Unknown
  Description of Unknown: RightRegion for integrase B10755 sequence
agagagttaattgacaaggtacaagtcacatctgacaaggtggttattcgctggaaaatttgataaatttagttacgctattttcaataaaagaaagtaaatttgtcactcggacaaaaataaaaaaccttgctaaatgcaaggacacgaactttaaacaatcaactaaatgagccttcgctctacttcaattgtacgcaatttattgaccgatagcctaccacggtctgagccataaggagcgaccctataacttccgt

SEQ ID NO: 36755 - DNA, 260 bp, Unknown
  Description of Unknown: RightRegion for integrase B10756 sequence
  modified_base (95)..(121): a, c, t, g, unknown or other
  modified_base (167)..(212): a, c, t, g, unknown or other
agagccttaatcaagaaagtacaagtcacagctgatagcattgttattaagtggaggatatagagagagttttactatccctcatttcaaatcannnnnnnnnnnnnnnnnnnnnnnnnnntctttattttcttaaaaaatcaataattttactatccctcatttcnnnnnnnnnnnnnnnnnnnnnnnnnnnnnnnnnnnnnnnnnnnnnngatcagagtaaaagcttttacctttgcttcttttaatttcatcatcat

SEQ ID NO: 36756 - DNA, 260 bp, Unknown
  Description of Unknown: RightRegion for integrase B10757 sequence
ggcgcctcgcggctgacgttcgtcactgttcgcgacgagctcggcggcgacgcgctcggctaggatgcggcgcgccgcgcggcgcagcaccgcccgcacgcgagcgtgagcggagggtggcaatggatcggcggccatgtgtggccagtatggcgccggggtccggtgggaaaccatcgaagccccggcgcctctcgcgtttgaaacgcgattgtgttgtgcagacgtctgcacaaaccggcgcgcgccggcgatcgcgc

SEQ ID NO: 36757 - DNA, 260 bp, Unknown
  Description of Unknown: RightRegion for integrase B10758 sequence
atagaatattcaaagcaagccagaggaaaatcctttgatttgagaatatatatgaaaatatgattgacaaatctggtcattataatttatgataaatgatgtatcatgattgaccagatttattggtcaattcatgataacacaacaattgaataaacgagccagcaatggctggggcttgattcccaactgaaagccctaaaatataaaacgagagtttgacacagcttgtgatggtgaaaaatgtgtccggtgcaatg

SEQ ID NO: 36758 - DNA, 260 bp, Unknown
  Description of Unknown: RightRegion for integrase B10759 sequence
aagggcatggcgcggggaaccgctcccgctctgtccgatcgcctggaggccgtgctgcgctagtcggtggcggcctggtcggccagcagggcccgggcctcgccgtaggtcgcctgctcgttgccgttgaccgccttgagcagccggttgaagtaggcccggcgctgctcgtcgcgctcggcgaagcgggcggtcagctcttccatttcctcgaggtaccggcgcaggtcggccagagtgtcgtcgtcgctcgaacgggg

SEQ ID NO: 36759 - DNA, 260 bp, Unknown
  Description of Unknown: RightRegion for integrase B10760 sequence
gtaattgacaaaatcgtattcgaccggagcgcgtggacatttgatgtgtatttcaaaccttgatttattttattcaatcgttgtatatcttttggaggataggcgacccttatctcataaagatatataacagcgcaaaacggggcgacaggctcatcacctgccgccctttcattttgccgggtcagctctgttccatctgagaaatcattctctggaggctctggcgcgtctggtcgtcaggcgcgtcctccatcatt

SEQ ID NO: 36760 - DNA, 207 bp, Unknown
  Description of Unknown: RightRegion for integrase B10761 sequence
gctttgattgatcgtatcacggtatttcaagatcatattcatatcaaatataagtttgtataattttcttatgcgaaagcattactcgtaaataggagtgacagttttaattgtcactcctatttacgagtaaaaggaaatttatcatgaacaagtttttcgtctgattaaatgatatcatttatgacctcacctcgtcaacgtaga

SEQ ID NO: 36761 - DNA, 260 bp, Unknown; identical to SEQ ID NO: 35754
  Description of Unknown: RightRegion for integrase B10762 sequence

SEQ ID NO: 36762 - DNA, 260 bp, Unknown
  Description of Unknown: RightRegion for integrase B10763 sequence
gtccactcacttatcgaccgtatagagctaggcgacgatattaagatttactgggctttttaattatttacctttgatatgcaacacgcgacctctatatgggctgaggtctatagttgcataaaaaaagaccctagagtcataagaccctagggttattttaacatattattttttaattactagcttttgacctacataaattaagttagggttagctatattattatctttagctatcttacgatagtcaacaccgt

SEQ ID NO: 36763 - DNA, 260 bp, Unknown
  Description of Unknown: RightRegion for integrase B10764 sequence
tcactcattaatcatatagacatagacaatgatgacatcacaatctattggaatttcatgtgatgtaacaatcattatatttttttgagttttgatgccatattaggacagtggttttatctattgacctaatatggcatcatttttttatgcaaaagaaaagagccacccacaaaggatggctcaattctcatttggagaaatgttttgtacttcttgcaatgattatatcacaattttttttctgattggagtttttc

SEQ ID NO: 36764 - DNA, 260 bp, Unknown
  Description of Unknown: RightRegion for integrase B10765 sequence
aaattatttgaaaaaatagtatattacaaagatagtgggatgctcacaatcacttataaataaagggaatttttatttgcatatataaagaccttaattccagttaacttccttatatatgcaggaaaggaagattaatgatgaataactattgtatatatataaggaaaagaaaaaacaaaccatattgcagtttgctaaaagaagaaataacgttttcccgttgtaaggaatgtgttaataaagaatataaagaaaag

SEQ ID NO: 36765 - DNA, 260 bp, Unknown
  Description of Unknown: RightRegion for integrase B10766 sequence
gttaccgcgctacacgcgattgcatcggcacagcacaaagccctacaggactgcaccggatgactgggccggacctgtagggcttcggaaccgcctaagcggttctactggcacacacggtgaaaggttaaggccgtgtgtgccagattctattagtcagcgaggctgtaccccgtaccgccaccacggctctttaggcgactctcaactaccttgccagcctcaacgagtttggttcgctcggtacgcgcctgtgtgcg

SEQ ID NO: 36766 - DNA, 260 bp, Unknown
  Description of Unknown: RightRegion for integrase B10767 sequence
atcaagccgacgagcctgcggggacgcttcgaccctgaccgcatcgagctggttccgacctaactcctgggcgacagcggcagccgaagcaggcagatgcgcagcctgggcagatagatccggcaccactgcgtagtcgtctcgggtggcccgggatcgatcggcggcggggtcgtcacgggaggggtgtccggtggtgtactgggcggaccggagggatcgccacctggcggcggcgccgtggtcggctcactgcggct

SEQ ID NO: 36767 - DNA, 62 bp, Unknown
  Description of Unknown: RightRegion for integrase B10768 sequence
aaagaggatggcgcggtagttgttgttttcaagggtgggattgagactgcaattgagggatg

SEQ ID NO: 36768 - DNA, 97 bp, Unknown
  Description of Unknown: RightRegion for integrase B10769 sequence
aaaaacctgatagataaggtatttgttaaacctggcatcattgatataaattggagaatttaggtcagaaaaataacaaatttagatactcttgttt

SEQ ID NO: 36769 - DNA, 260 bp, Unknown
  Description of Unknown: RightRegion for integrase B10770 sequence
aaaaatctgatagacaaggtatttgttaaacctggcatcattgatataaattggagaatttaggtcagaaaaataacaaatttagatactcttgtttcgaccagtgtaaaagcttttgccttcgcttctttgaacttcatcatcatttttttcatctaaaaattcacctccatattttgatacatgggcagcaacatagctgcgtacaataaaacgattagtagggctacaaaaataaataccatgggttgtactagatt

SEQ ID NO: 36770 - DNA, 260 bp, Unknown
  Description of Unknown: RightRegion for integrase B10771 sequence
gacgggatcgtcgacctcgacttcgtcgacatcatcccgaagaagctgcccggcgatgcctgagcctgagcacatcatccaagccatatgcaacgacccgcggcacgcacgcggcaaggtggcgaaggtggcgacgttcggccggttcaccttccctcacggcgaggtccgctggcttatcctcgatgccggtgagtggcgctacacgcggcccgacccgaccggcgtttaccggcgttacggcgcccacgacgaggaca

SEQ ID NO: 36771 - DNA, 96 bp, Unknown
  Description of Unknown: RightRegion for integrase B10772 sequence
aaaaatctgatagataaggtatttgttaaacctggcatcattgatataaattggagaatttaggtcgaaaaataacaaatttagatactcttgttt

SEQ ID NO: 36772 - DNA, 260 bp, Unknown
  Description of Unknown: RightRegion for integrase B10773 sequence
atcaaagagttttcaatgggtgaagacagaaaagtggacccggaaagtattatatttttttaactaaatgtgcgtacttttcggggcgcaccgttcggtgccagtataaaagtacacattaaaaaaagaccccggagggcttaaagcctcccggggttttctctgttcttatgttctttcgtgctgagtgccgaagtagaaggccatcaccgtggaggtgatcaccatcacgttgtccggtgtgatgtcgccacgaagcg

SEQ ID NO: 36773 - DNA, 62 bp, Unknown
  Description of Unknown: RightRegion for integrase B10774 sequence
tttatcgataaaatcatcttcaatcgttccctatcttccgttgagttatttttctgtttttg

SEQ ID NO: 36774 - DNA, 260 bp, Unknown
  Description of Unknown: RightRegion for integrase B10775 sequence
ctgattcagaaaattattttcaacagaaaaacaagtcaggttgttattttttatcagttctgattatcagtttttacagattggcggactaaattgtaaatactgataatacatagtgaaaaaacacaaatccctgccatatcattcaggcagggacttttttaatcgtatcaaacgcaaaaagcaataaaattgcgttttaggagatttttataagagtgcttttcgcaattttttttaaatttattgttcattttgaa

SEQ ID NO: 36775 - DNA, 260 bp, Unknown
  Description of Unknown: RightRegion for integrase B10776 sequence
tacaatatccgagaaaagggcccgcactcacgtgttcgagtacggcccgaatggtggagctgacgggagtcgaacccgtgtccgaaaagaaatcagttagagtatctccgggcgcagtgtgcttattaaatttcccttggtgcgggcgagcacacacgcactacaccttggtagcttcataagttcatgccgggccgcaaagcttaagcccgttcacgttcagtacctaatcgacgccctgaccccatgcggtactaaca

SEQ ID NO: 36776 - DNA, 62 bp, Unknown
  Description of Unknown: RightRegion for integrase B10777 sequence
tacaatatccgaaaaaagggcccgcactcacgtgttcgagtacggcccgaatggtggagctg

SEQ ID NO: 36777 - DNA, 260 bp, Unknown
  Description of Unknown: RightRegion for integrase B10778 sequence
ggtgcgtacgaactcgtctggcgggatgtgttcgcggaagccctgacgcattcacgcagctagatttattcctgaagaaggcgggatacgtggaaggaccgggggctcctcgcatgagtccccggtcccctgccccaacaccgacagccgggccaccctacgtccggctgttggctacccgttcattggcgcggtgccggagccacaggtacgccatgtgcccccggtgcttcgcgccgagttgccactccgcttgcagc

SEQ ID NO: 36778 - DNA, 260 bp, Unknown
  Description of Unknown: RightRegion for integrase B10779 sequence
cctatggagcagattaagtttagagttaaggataagtcgatcagttcacccgttttgagatagtcacgaccaaggcggctcaaatccttagtgataacaattcccactttgccgtcctcgatgtcagccatcatcgctttaaaaccgtcacgctcccaagtcgttccggacactccgtcatcaacgtagtaagccgtgttgcggaaaccattatcatcggcatacttcttgaggatagccttctgattggtgatgctgtt

SEQ ID NO: 36779 - DNA, 260 bp, Unknown
  Description of Unknown: RightRegion for integrase B10780 sequence
atcctctcctatatcgtgtatgaaaaagccgaccgccgcctcgccctttatttttacccgtgatattatcggtttttgcaatacggtggcccggattgtaaaaaccgataagttttccacatgagcggaaagcttatcggcaatgacagtataccacttttctccaaaaacacaagacgccgcccagagagattgtctccaggcggcgtcttgtttattctgtctgtttttcgttattgatatcggctttttcgttatca

SEQ ID NO: 36780 - DNA, 260 bp, Unknown
  Description of Unknown: RightRegion for integrase B10781 sequence
gctttaattgaccgcatcaccatcaatcaagcgtctatacacatcaaatatcgctttaattaagtttactcgtaaccatttgtgacaatcttgattgcaactaatatacacgagtaaatttgaaaaataaaaaggacggctcccgatcagagaaaagcatcctcacaagatgcctctctcatcaacgagaaccgtcctcttttcgagtttattgtgttacatggagaaatactcgcctatcaccttaaaagccgtcagaa

SEQ ID NO: 36781 - DNA, 260 bp, Unknown
  Description of Unknown: RightRegion for integrase B10782 sequence
ctgccggcgtccaagcgcgggccggggttccgggtgcaggacgtgcgcgtggaagagcgctaggcgccacagtcggcgccgatcttgtccagggcggcctgggcgtccttgacgtcctggtagacggcgctacccggcgtcaccgcgtccatggacaggaacgacagcttcaccgccgcgagggccgcgtctatcgcgatcttgccgcgcgacgtgtcgcgaaggccggagatcagcgtggtggcgccggcgtagtcctg

SEQ ID NO: 36782 - DNA, 60 bp, Unknown
  Description of Unknown: RightRegion for integrase B10783 sequence
gaggaaatgattgcagaggacaagcaaatcaaccatgccaaaaggatgtcagttcaacaa

SEQ ID NO: 36783 - DNA, 260 bp, Unknown
  Description of Unknown: RightRegion for integrase B10784 sequence
aaaaacctgatagataaggtatttgttaaacctggcatcattgatataaattggaggatttaaggttgaaaaataacaaatttagatactcttgtttcaagtagcgtatctaaaactcttatctaaagaatacaataaaaccgcaggttgttgcctgcggttttgtgtaatctattttgaagtctttctattgttatttggtcgtagtcgtaataagcccgtcaggctcaacagtaaatgcagccttatcggccatacgt

SEQ ID NO: 36784 - DNA, 219 bp, Unknown
  Description of Unknown: RightRegion for integrase B10785 sequence
  modified_base (176)..(176): a, c, t, g, unknown or other
agagagcttattgacaaggtgcaagtgacttccgataagatagttattaactggaagatttgagaaatttactatccttcatttcaatcagcgtaaaagcttttactttgagtgtacgcaatgatttcataaaggaacctccaaattttcataaataggcagcaacatggctgcancagcgtaaaagcttttactttgagtgtacgcaatgatttcata

SEQ ID NO: 36785 - DNA, 260 bp, Unknown
  Description of Unknown: RightRegion for integrase B10786 sequence
actcgccgtggccccgggttcgacccggcaagcgtccgtgttgagcgtgtggaagttacatgacgctaacagtgagactcaggtcacgtagcggagcgtaactcaaacgagatgcggtgagccgtagcgctaccccctgttgtaacgatcaagtgggggtaccgaccgatccacggggtggtgacaccggccggcacccttgccaatccaacgaggcggggaccggtgagttacaggtgagttacgagctgggagagaac

SEQ ID NO: 36786 - DNA, 260 bp, Unknown
  Description of Unknown: RightRegion for integrase B10787 sequence
tttgtcgaaaagatcatattcatgaagccaagcggtcgcattgagatcgtttatcatttgtgaatctggttatatctttttggtgctgagaccgccgagcatcaaaaacatataaagcaaaacacgcccgacggagcaagcccgccgggcgttgtcaatgtaattcgcttgtacaagacttgtatttgacttgtatcagaagcaaagcgccgcctgcgtctgcgggcccgcgatgccgtcaacctcaaggccggattcga

SEQ ID NO: 36787 - DNA, 260 bp, Unknown; identical to SEQ ID NO: 36786
  Description of Unknown: RightRegion for integrase B10788 sequence

SEQ ID NO: 36788 - DNA, 260 bp, Unknown; identical to SEQ ID NO: 35818
  Description of Unknown: RightRegion for integrase B10789 sequence

SEQ ID NO: 36789 - DNA, 260 bp, Unknown
  Description of Unknown: RightRegion for integrase B10790 sequence
actctgatcgatagaatcatcatcgatggtgatgatatcatcataaaatggaaatttgcataaatagaaaaaaccgcatgacattgtgtttcatgcggttcttattttttacgcaaatagacccttttattttaataaccaaccttatttacaaaaataatatgagcagatgcagagtcatttgcttttcttctgcctctgaggcttgttatttgccctctaaaatccattttagcttgttctgtaagtatttctccatt

SEQ ID NO: 36790 - DNA, 260 bp, Unknown
  Description of Unknown: RightRegion for integrase B10791 sequence
cggcggatcgagcctggccgggtggatctgcggtttgggccgcaggttcctgatgtgctgtgaggtgcggcgccggggcgtgttgccccggcccgctgcggttgcctagctggcgcgcgaatgggccgaccctggctgcccggggtcggcccagttctgcgtccacgcttcggagtcgaggcaggcctggaaggtttcggtcatctcgcgggcggctcgcggggagatctcgccttcgacgaacgtgaggacgacctcgc

SEQ ID NO: 36791 - DNA, 260 bp, Unknown
  Description of Unknown: RightRegion for integrase B10792 sequence
atcgccgacaggatcacctttatcaaacccaaaggtataatcgagattttttataagatctaatacatatctttttggtacttagaccgccaaacctcaaaaagatatattgatcttaacggtattatatttataagtataacacaaaagccgggaacaatcaatgctcccggctgcattatttgttgaattctttttacatttcctccaacagtcccgaatacaaatggtcatccagctccacggtgatcttcacagac

SEQ ID NO: 36792 - DNA, 260 bp, Unknown
  Description of Unknown: RightRegion for integrase B10793 sequence
cggaaggatttcgtcaatcgttacgatgttgaccttgatgtgaccatcattttcggttcttaatcgtgtttatgatacatctatgcccatagatgttgcaaaaacaagattaaaccccttttaaggcacttaattagcccatacagacaaattaaaaacctgcacgataattgtatcatgcaggtcattaaaaatgcaatacagacgattttgtgaggttgtttttccccttcaataaaattctgcggtgcgaatgttgt

SEQ ID NO: 36793 - DNA, 260 bp, Unknown
  Description of Unknown: RightRegion for integrase B10794 sequence
ccgatccagccgatctggatcgacgaccctgacgacccacgcacgctccggatgcagggctgacagcatccgctcccacgcccgggcagcgttccccaacgcagcttcgacgtactcgctcacgccgccatcctccgctgcgtcctgcgccgcatccgctccgccaccaccgtgatctcgtccgccaacaacagcgcctccgccacgtcgatccgcagcagacgctcttggtcggcggtcaccacgatctcgtcctcgcc

SEQ ID NO: 36794 - DNA, 260 bp, Unknown
  Description of Unknown: RightRegion for integrase B10795 sequence
ttaaatctaataatcaaaaaaataattattcattcttataatgaaatagaaattgtatattaaaaactcactaaattaatagtgagcttttttttatttattcacgaactatctcttgaattcctttttctttcaatttttcatatgttgtttcatctatcaagatatctacatcatcgtttccatcgttaaaaatatacacatattcatctgaattcaacttcttttgttttcttatataactgtattcgtttgcaaac

SEQ ID NO: 36795 - DNA, 260 bp, Unknown
  Description of Unknown: RightRegion for integrase B10796 sequence
  modified_base (91)..(91): a, c, t, g, unknown or other
gagattgtggtatcaagggttgaagtaactaagaatggcattgatatttttttcaatttttaaccctgttttactaccaagtattaaaatngctctgcctccattgaaagccgagtggcagacatccatgctgccttcgcagatgagtccgttgatgccattctggctactatcggcggtttcaactgcaatgagctcctgccctatctggactttgagttgattgctagaaatcctaagattttctgtggctactcaga

SEQ ID NO: 36796 - DNA, 62 bp, Unknown
  Description of Unknown: RightRegion for integrase B10797 sequence
agggcgctaattgaaaaggtacaagtgacatctgagcgggttgtcataaattggaggatata

SEQ ID NO: 36797 - DNA, 260 bp, Unknown
  Description of Unknown: RightRegion for integrase B10798 sequence
aaagaacttcccttggaaactgaaacaaccgtcgaaaccgtgtgtctactttctaggaaataagctggtttgctgacttgaaatgcggaagttcagtcgatttgccacccatttgccacccgcaaaaataaaatagaccgattttcaagaaaagcggctgaacactctgaactaaaatgagatgttcaaccgcttttttactatgcttttttgtgaatcgcattctcgaatacatcaactgccgtttgctgcatcagctc

SEQ ID NO: 36798 - DNA, 260 bp, Unknown
  Description of Unknown: RightRegion for integrase B10799 sequence
tccactctcattgaaaaggtggaaattgacggtgaagacatcagaatacattgggctttctgatgtcttaatgtgcaagtgtttttatctcgctttgttcaaatataattacttgcaacacagacaaaccttgatgcaatagcattctacaacaaaatgaagggattgggaagattgaaattcaaaattgataacggaattacaataatatccaccggtgatgcttcaggtggaaagaaaaacaaaaacggatatgcagg

SEQ ID NO: 36799 - DNA, 62 bp, Unknown
  Description of Unknown: RightRegion for integrase B10800 sequence
gatggaaggtccgccgacgtgtacccctcatggggtgggcttccatcccgcgtctcctggta

SEQ ID NO: 36800 - DNA, 260 bp, Unknown
  Description of Unknown: RightRegion for integrase B10801 sequence
caacttattgaccgcattgacattgatggtgatgatgtcattattcactggaattttgcatgatttttgcaaaattaggcattataatgcccataattgcaaaataaaaagcgcaccacttaaggtgcgctttagatttctaatttagcaacttactgaagtaaactgcatcattgggtattctccggatcataagattggaacacttcaaatgtgacaactgcacctgctttttcaatgggtgtggtaagtgtcacagt

SEQ ID NO: 36801 - DNA, 260 bp, Unknown
  Description of Unknown: RightRegion for integrase B10802 sequence
cagctgattgaccgcattgacattgatggtgatgatgtcattattcactggaattttgcatgatttttacaaaattaggcattttaatgctcataattgcaaaataaaaagcgcacctattaaggtgcgctttagatttctaattgaacagcttactgaagtaaactgctccattaggtattgtccggatcataagattggaacacttcaaacgtgacaactgcacctgctttttcaataggtgtggtcaaagtcacagt

SEQ ID NO: 36802 - DNA, 62 bp, Unknown; identical to SEQ ID NO: 36767
  Description of Unknown: RightRegion for integrase B10803 sequence

SEQ ID NO: 36803 - DNA, 260 bp, Unknown
  Description of Unknown: RightRegion for integrase B10804 sequence
cgcctcctcattgcccgcgtgatcgtgcaccgcgcctatccgccctgcatcgaatggttgtaaccgtggcaggctcttgttgttgtgcatagcgcggttatccgcccatactggccacgggcacatacccgccgctggcgatgacgccgcgccaatacgtgcagtccccctgggtgcactccgagccgccgaagcacgtcacctcgataagcgcgccggccgcgttgcgccggaatatcgcgccgccacacatcccgctc

SEQ ID NO: 36804 - DNA, 214 bp, Unknown
  Description of Unknown: RightRegion for integrase B10805 sequence
aaatatattaaggcaattaagctagatacagagggtaagatagatgagattatatttttttaatagtagtgctactaactgcgccgttccgttcggccctaaaaatccgtacacttttcctttttccaagtgaaacgataaattgtcaacaacggtgacatcatcatatattttcgataaattttcaacttttatcattggctgatatactcct

SEQ ID NO: 36805 - DNA, 260 bp, Unknown
  Description of Unknown: RightRegion for integrase B10806 sequence
aagtatattaaggcaattaagctaggcactgacggtaaactagatgagattatatttttttaattgtagtgctactattcatgccgctccgttcggcacacatataaaagtagcacaactataaaggagctggaaacgttgaaaaataaggatattgagacacgtttaatagaaatgtatataagaggatggataactaaagaggagctggaggagaagctggataagttggatgagacagacaagccagatatgccaga

SEQ ID NO: 36806 - DNA, 260 bp, Unknown
  Description of Unknown: RightRegion for integrase B10807 sequence
aagtatattaagactatcaaactggacacagagggtaaaatagaggagattatatttttttaattgtagtgctactaactatgtcgcaccgttcggcacagtatagaaagtagcactactaaaagggagctggaaacgttgataagacaggacatagagaggcaaaaagaaagactgtttacaatgtatataaaagagttaatcacttatgaggagcttatgttttacttaaataagttagatgagccacttttaaaaga

SEQ ID NO: 36807 - DNA, 260 bp, Unknown
  Description of Unknown: RightRegion for integrase B10808 sequence
agacgatgggaggataagccaaccgtccaccccgtgccgggtggtttcgtgatggtggcctagaggttggagtgccaatagccgccgtcgtcgtcggtgacttcgcagacgcacagcatgaccagcagcatgaccagaatggccacaacgacggctcctagcacctccatgcgatgccctccttcgtccacccctgcctggcaagggtgtcgtactcgttcctgtctgcggtgtagatgtgcctgtcgtctcggcatagc

SEQ ID NO: 36808 - DNA, 260 bp, Unknown
  Description of Unknown: RightRegion for integrase B10809 sequence
gttaagaaagagggaaacagcaggaaaaactactcccttaacttcaatatcatttttgcctagttactgcttttatatcccttttcctttagcagaatagttacagaaacagtaaaaaagcccctagaacgctgtaaaagcttcataggggtgtttttatgttctacgcaataacttataccaaaagacttttaaaaacgcaatacaggacattttggagtgtgaaaaaaggcaggggctttttccctgcctttagattt

SEQ ID NO: 36809 - DNA, 260 bp, Unknown
  Description of Unknown: RightRegion for integrase B10810 sequence
atcttgaaatgcatcgttttcgaccggaagaccgagcattttgattttcaatattatgcatgaaatagcggagaaccttgaaaaataaggctctccgcttattataggttactgcactttagaccgccatagcgcggtaacctatgatatcattttttcttcgcgttctttctccatctggcaaaatcttcgcttgagaaaattctgctcccgcctaccctgagacgttccagctcaatctcgatcttcgcccgttcatc

SEQ ID NO: 36810 - DNA, 260 bp, Unknown
  Description of Unknown: RightRegion for integrase B10811 sequence
gatttaataaacaaaattacaataactgatgatgatatcactattcaatgggcttttatttaattatttttcctatgtgttatttataagctacctcattagcctaaaataaacacctacgaaaaaacgcaaaaaaagaacctacctattatataggtggttctaagctttagcgagtaggacgataaataaattataccataaataaatcatttgaattaaactgcgtatattataagcatcacatttaaaaggagaat

SEQ ID NO: 36811 - DNA, 260 bp, Unknown
  Description of Unknown: RightRegion for integrase B10812 sequence
aataaggtgaataatgaggtgaaaagtttaacatataacagcttcaagagaaaattcacataaaaaaatgcacctattctaaagagctggtgcataaaaaatgcacctattctcacgaaccagtgcattgataaatgtattataatttaatgaatacaattataatatagtattgttgtgttaagaaaatcaattttaaattattaattttagttaaaaataaaaataatttttattgaattatttttgttccgatatct

SEQ ID NO: 36812 - DNA, 260 bp, Unknown
  Description of Unknown: RightRegion for integrase B10813 sequence
atagtcgacagaatcgtctatatcaagccaaaaggcatcatcgagattttttataaactgtaaatcatatctttctgacatttggcggtcttaactccacaaagatatataagaaaaagcctcccctttttgtaagaggaggctacaagcattaatctataagtccgctgaattcgtggtcggttatgagagcatcgtcgaggtacaccctcaggcggtgctttttttcttccgcagctttccagttgttgagttccgct

SEQ ID NO: 36813 - DNA, 150 bp, Unknown
  Description of Unknown: RightRegion for integrase B10814 sequence
cataccaaaggtaaagggtatcgtaatcaaaaaatacgaatagcagatgtgagcttttattaaaactcaatctgcttaaatttattcgtatttacgttacctttactacgacaaaatgttcctgattaagtgaagtcatatcaggcatta

SEQ ID NO: 36814 - DNA, 142 bp, Unknown
  Description of Unknown: RightRegion for integrase B10815 sequence
gctagtatcatagataaagcctacgttttggataagaaaatagttaagatagattttttataacctcagttctcataaatgcacctctccgttttgtcctatataacccactatactaccttcttcaatattaaaagagata

SEQ ID NO: 36815 - DNA, 102 bp, Unknown
  Description of Unknown: RightRegion for integrase B10816 sequence
aaaaatatcataaaagaaattattgttacaaaagatggtatgtcgataacgctagatttttaaagggtctagcgtatttctgtattttagtcaaagtaatta

SEQ ID NO: 36816 - DNA, 260 bp, Unknown
  Description of Unknown: RightRegion for integrase B10817 sequence
cagccgggcggtgtgcgggggaagttcgacccggcgagggtggtcaccgagccggggcgctagccttccgcgctgcacggagggtcgaacatcatcccgctgcgcccctcgctgatgcactggagacacgccacgtactgatggccgtgggagcctgggcccttcctggctgtagcacactcgcagctgtggaatccgcagagcacgcggttcggcaggaagcggccttgcgggttccggccgtagcgcagaacgtggcc

SEQ ID NO: 36817 - DNA, 105 bp, Unknown
  Description of Unknown: RightRegion for integrase B10818 sequence
aaatctgtcgtaaatgaaattgttgtaaccaaagaagaaatgacgataacgctagacttttaaaggtttagcgctatttttgtattttagtcaaattgataatga

SEQ ID NO: 36818 - DNA, 162 bp, Unknown
  Description of Unknown: RightRegion for integrase B10819 sequence
aaatctgtgataaaagagatagttgtcacgaaagatgatatgacgataacgctagacttctaaagggtttagcgcctttttgtattttagtcaagtttatcatgataactttattatacatattttcttcctcctacttatctattcgtaggaaatcaaaaa

SEQ ID NO: 36819 - DNA, 260 bp, Unknown
  Description of Unknown: RightRegion for integrase B10820 sequence
gttgaggccgtggtgctgcgcttggacggctgcggggctatctcctccttagggttaggctagccgctagcgaaccttcatcagtggatcacgaccgctaccaacacccgcccctagccacgcgtcagcgctttggccgcaccttgaccgcctggtgcaaccgcaacggatggatccacagcacgctgcatgagtggggtgagcaggccggcttcccggccgtgcgcgacagcagcttcaacaaactgcagaacgccaag

SEQ ID NO: 36820 - DNA, 260 bp, Unknown; identical to SEQ ID NO: 36433
  Description of Unknown: RightRegion for integrase B10821 sequence

SEQ ID NO: 36821 - DNA, 260 bp, Unknown
  Description of Unknown: RightRegion for integrase B10822 sequence
tggactcacagtccagtgctcccgtccgcctcaaaacctcgagcttctcgcagtcgcgcatagcgcgccatcgaaatatctcatcgagagtcctgccacagccaatgcatattgtatcacataagatacaatttccagtgcatgggcttctaaccattcagcttcagcaggaactcatccacgagcttcctggtcgtagccagtccggacagagtccgaaacatagtcagccgcactagcgatccagacgaattcctgcg

SEQ ID NO: 36822 - DNA, 260 bp, Unknown
  Description of Unknown: RightRegion for integrase B10823 sequence
tcggcgctcattgagaagattgttcttgatggcgaaaacatcgaaattcattggcgtttttagttttgtctttttttactccgtaatgcgtttatgtcgttagataataccatattacggagtaaaaaggaaaacgcccctcggagctatgtctcgagaagcgtcttcagaaagaagaaaagtatataactaattcaagtattttgcggtgcagccgctactttttttaaccatttcatattttagcccctttctatact

SEQ ID NO: 36823 - DNA, 260 bp, Unknown
  Description of Unknown: RightRegion for integrase B10824 sequence
actagaaaaatgcagatcgtgcactttgaagtagtaacacgacccgcattgtatcttttgtaaacattacatgttaacaacgtgtaattaagtgaataagaaatgaattatatttcagtttggttaagacgcaacgtgttgtccttctgttatgttataagtaaatgttgttgtgcatgaatgttctccgtcatcaaatgtcaatgttgctgtcccacttcctgcttgataaatagaaacattcacaccagagatgtatg

SEQ ID NO: 36824 - DNA, 260 bp, Unknown
  Description of Unknown: RightRegion for integrase B10825 sequence
tgtgccttgattgacaagatagttcttgatggcgatgacatcaccatccactggaggttttagccattaatcaaagattccctccgcaatattgtctatatggtcaaggcaaaacatcattcgtcattctcaatcaactcctccatgctacaattcaacacctttgccaatttatgcacagtttgtgcttgtgccttgtttattgatctgactccttgctcatagtgttgaatcatttgaatgttcacaccagattcctt

SEQ ID NO: 36825 - DNA, 190 bp, Unknown
  Description of Unknown: RightRegion for integrase B10826 sequence
ggacccgcggcaactgtggagttcacatcacgatggggaacgtcggcagttttgcgcgtctaatgggtatccgcccacccggcgatctgatcctctggcgacggagcggccacctcgatgcagctcacgcgtcggcgccgcgctggcctctcctgacacagcacagcccccacgccgtcgggcgcagggg

SEQ ID NO: 36826 - DNA, 260 bp, Unknown
  Description of Unknown: RightRegion for integrase B10827 sequence
gagttgcgggtgggtcgtgtggatgagttgcggatccggttcgaccgggcggcggtggcgtgatgagcaggtgggacgagctgatgcagaagttggacgagggctggacggcggaggcggcggagatcgacgacgcggtgacgcgggctccggtgccggagggcgaggagttgacgaccttggccggcctcttgaagcccgtgaccgaaccgtgatgtttggcgtgcggcggtgtgctggtgtgcatcgccgcaggtcag

SEQ ID NO: 36827 - DNA, 260 bp, Unknown
  Description of Unknown: RightRegion for integrase B10828 sequence
ttcgatcccagcaccatccagctggactggaaggtgagcgaggccacagccgttgctgcgtaatgacttacggctcagccccgtcccttctacgtacgtccacaccacccactgaaaggctcagaagcaatgcgaacggctcagctcctcctcacagccgctgccatcggcgcggcagccatcaccctgactgcctgtggctcacaggctgcgccagccaccaccatggccagcgacaccacccacacatacacagtcgg

SEQ ID NO: 36828 - DNA, 260 bp, Unknown
  Description of Unknown: RightRegion for integrase B10829 sequence
gacaaaattgtttttgataaatcggctcaaacattgcatttaacatatctttaccaaatgtgattaggtccgcctaatttcttttggtaaaaaaatagacctcctaaagtggaggtctaatcaaatatttttcttcaatacattgtaaagttctaaaaaatctgcatagtgattatgttcgtttactacgtctaaaaatttatcatacttttggtggaatttgtgatgacagttgctgcacaacaaagtgcaatgctgca

SEQ ID NO: 36829 - DNA, 260 bp, Unknown
  Description of Unknown: RightRegion for integrase B10830 sequence
atcaagagtttcaccatgggagaggacaggaagattgatccagacagcattatatttttttaacattttacttgtactttttacatagccccgttcggtgcatatataaaagtacgacaaaaaaggccggggattattccccggctttttactgtttgtgcaggatattgattttttcgtcaatgccttccaccttctgttcaagggctggcattctttttgcgaagttgttatgttcacgcacttcccgtgttagctca

SEQ ID NO: 36830 - DNA, 260 bp, Unknown
  Description of Unknown: RightRegion for integrase B10831 sequence
tcggtaattgatgaaataaaagttgatgtgttgaacaaagaatttaaaattaagtttatataaacccattttcaaatgggtttaaaacttacctatactttgcttaacattcctgctccagttggagcatactatttaaacaaaatttttaaatgagagaaaacagctttaaatgctgatataataggcttaaggagtgattcatatgggtaataatagagacttatttaatcttgcaaagaattatgtaatggtttttg

SEQ ID NO: 36831 - DNA, 260 bp, Unknown
  Description of Unknown: RightRegion for integrase B10832 sequence
tctctgattcgtaaaatagttatatatccggataccattaaaatattctggaaatttatataattcgtacgcatggtttcaaccatgaaatcattttatataaatacttaaactgtcacttcatattaaacattcacatgcattgactagacgaagaattactaatattttttgtttacattttatcctattggtaatataatctaatggtaaacattggcacgatacacaggagagcaatatggacgcaatttgcacta

SEQ ID NO: 36832 - DNA, 260 bp, Unknown
  Description of Unknown: RightRegion for integrase B10833 sequence
cgttcgatcgtgaaggaaatcaggatggatgcgtcaaagcagctgaccgtggaatttgcgtagtagttaaaacccccatccgttaggataggggtggcagatactacaaaaatagagggcggtctatgccgcccccagaaagtcgagttcataatctttttgttcttttgccgtcagcccccggtcgtacaccagaatgtcgtggtatctgcctgtcggatcgtcttgacgttccacaacgcctttcggctggcatccgg

SEQ ID NO: 36833 - DNA, 260 bp, Unknown
  Description of Unknown: RightRegion for integrase B10834 sequence
attaataatgtaactgtaacaagattggttgatgatatagatatttctattaattttttatagttttttgcagataatttttattctgtcttcaagaaagtaaacttcaagaaggtcaaattaatttagaacttgatgggtattatcaatattggaattatgctgagaaaaaggggtatagtggaacagctatattttctaaaaaagaacctattacagtttcatatggaattggaatagaagaacatgataaagaggga

SEQ ID NO: 36834 - DNA, 260 bp, Unknown
  Description of Unknown: RightRegion for integrase B10835 sequence
gagcctgacggtctgcccggtcccggtcggcgcaacctgccgctcgtttccttcgattggtaggcgcttgcctcccttgcgcttttccatgatgcgggcgtaggtttcggccacttcactcacagcgcaacctccagggcaatgaggatcacggccatgcctacaaacagtgcgatgaactgccaagcccagagattgtctggcgggatcatgggcgcgtcagcctttcgaagccggcttcagtcaagtgaaatggtcca

SEQ ID NO: 36835 - DNA, 260 bp, Unknown
  Description of Unknown: RightRegion for integrase B10836 sequence
atcagccagcactcatctgactgccagggcagagacagggtgatgattgagagagccatctgaccctggctttacaacctgaagaatgaaagaacccccagggatgatgccctgggggttcttctctttcctgtgtccatcactactcaggagaagccagcataaaccttctcccagccctttaccagcctggctcagatggtctaccgtcctgggcatgctctcagatgctgcctggctggccagagagagaaccagag

SEQ ID NO: 36836 - DNA, 260 bp, Unknown
  Description of Unknown: RightRegion for integrase B10837 sequence
atggtagcgggggcaggctatggactcaatctcatcgccagcccgctacggctaccgctataagggcgcgcattctaacctcagaaccctaaaagaaaaagagcccgcccctttcggggcgggcgttctttcgcttgcgaaacctaccaggcccagccgatcaggacgcgtgcctccgaacctccctcgcgtaatgcgctcacttcgacgccgaaacgcaggcgccagatgtcgcggtgcacgaaaacaccataggcctg

SEQ ID NO: 36837 - DNA, 260 bp, Unknown
  Description of Unknown: RightRegion for integrase B10838 sequence
gtgagcgatggagcagtgcagcaggtgcggctaagggccggggaggcggctgcccatccttaggggtaggctagccgctagcgaagcacaagcattggatcacgaccgctacagccatccaccgctagccacccgccagcgctttggccgcactctcacggcttggtgcaaccgcaatggctggattcacagcacgctgcatgagtggggtgagcaggccggctttcccgccgtgcgcgattcgagtttcaacaagctgc

SEQ ID NO: 36838 - DNA, 260 bp, Unknown
  Description of Unknown: RightRegion for integrase B10839 sequence
cttatttccacagtaacattaaatagagactccgaccctgtaattgaatggaattttttttgattcttcttcattcttataggtaatcggtaagagaaaacataatcagaatgaagataaacaagaccccgtcatggggtcttgttgctttatttagatggatttctatagattgaagtcaacttataataaacatcaataggggttttccccggatttctttcgtaattcaaaagtgtttgcgaggacacatttaccat

SEQ ID NO: 36839 - DNA, 260 bp, Unknown
  Description of Unknown: RightRegion for integrase B10840 sequence
gaaagcattgaatatactaggcttaaagacgacgtggcgcttaatataaagttattgttataattttcctcttgtagcaataattttttatgtgatatagtgtaaacataaagacacaactacataggtgtataaatgtttacactatttttttcgtcgtgttgctgccgtgcgacgtaaaactataacggcgaggtttcgcttagcccctgcatagagtaagcgcggtactatatcgttagcggttatatggtatagtt

SEQ ID NO: 36840 - DNA, 199 bp, Unknown
  Description of Unknown: RightRegion for integrase B10841 sequence
ataaaggaatttagtgttgacgataacaaaaaaataatagaagatagcattgtatttttttaattaaaacgttgtactttttgatgtgcaccgttaggcccgaccaaaccatatatagtgccctttcttacatgaagtgaaatgtcatcaagcgccttgtagttatcaaaatatttcgttactccaaaaaccttaatca

SEQ ID NO: 36841 - DNA, 260 bp, Unknown
  Description of Unknown: RightRegion for integrase B10842 sequence
ataaaagagttctccattgacgaaaacaaaaaaatcataccggaaagtattatatttttttgattaaaaagttgtacttttcggtgcgctccgttcggtgcatgtacgaaagtacaacttttcaggaagtgccgcaagccttgatatatcaacattatacacgaacaaaggacagaattgcttctgtccttttaattttgtaattatgtacggtcaaaatccaagaaagttccgaagtattctatctctctcaaattggt

SEQ ID NO: 36842 - DNA, 260 bp, Unknown
  Description of Unknown: RightRegion for integrase B10843 sequence
gaatacagcaaaccgagcaggaaagacgacccgtcgttcacgataatatatgcccgttcttgaatacctatctttgaatcctttatttataaagggttcgatcataactattcgtctatcatagcccggcggcaggtatcgataaaccactgccgcttgttgtccagtccttcccaaaaggctatgacatccgcttcgtactcccggtgtaaaagcacctgcaccgacttcatggtttttttcgcccacttcttttgagc

SEQ ID NO: 36843 - DNA, 260 bp, Unknown
  Description of Unknown: RightRegion for integrase B10844 sequence
tctttgattgaaaaaatagagataaacggggataacgtaaatatcttttggcggtttgcgtgatttttacgcaaattgctatgtttgttttaatagccgttgcaaatagcgtaaaagggaataggtttaagcctactcccttttttcttataacttgccctcactctttaactgttctacttttctatgaatataggaattaccgccttgtttggtgtaatgttcgtattgttcccaaaaccgctcaatttctgtttctc

SEQ ID NO: 36844 - DNA, 260 bp, Unknown
  Description of Unknown: RightRegion for integrase B10845 sequence
gaacgtgttgaatttacacgtttagaagaaaatgcaagtttaaatataacgctattgctataattttctatttacgcaatagcgtgttatatggtatagtgtaatcattgagacacaaatacataagtgtaacaatcattacactattttattttcgtcgtgtaagctaccgagcgacgttataataactcggtgaggtgtggcacgcccaagcaaagaggtaaaaccccgtaagtgattagacggcggtagctcggtgg

SEQ ID NO: 36845 - DNA, 260 bp, Unknown
  Description of Unknown: RightRegion for integrase B10846 sequence
gtgagtgatggagcagtgcaggacgtgcggctaagggccggggaggcggctgcccatccttaggggtaggctagccgctagcgaagcacaagcattggatcacgaccgctacagccatccaccgctagccacccgccagcgctttggccgcaccctcacggcttggtgcaaccgcaatggctggatccacagcacgctgcatgagtggggcgagcaggccggctttcccgccgtgcgcgattcgagtttcaacaagctgc

SEQ ID NO: 36846 - DNA, 260 bp, Unknown
  Description of Unknown: RightRegion for integrase B10847 sequence
cctttcgttgaggagcagcgtgacggtgcgttagaagggatcgatgaaatggagactgtgtgatgaaaatggataccgagaatttccgcgaagtgccggcccagcgaaaggtggaaatcacgatgacgggcgaagcgcgccagtttgaagctggcggccgttcggtaacgttcgtaccgttgagtatcaagcgccgcagttacagcaaggtgctggtgccaccgccggggagcaagagcgccaagatcaagtcgtcgttc

SEQ ID NO: 36847 - DNA, 260 bp, Unknown
  Description of Unknown: RightRegion for integrase B10848 sequence
tctttgattgaaaaaatagagataaacggggatgacgtaaatatcttttggcggtttgcgtgatttttacgcaaattgctatgtttgttttaatagccgttgcaaatagcgtaaaagggaataggtttaagcctactcccttttttcttataacttgccctcgctctttaattgctctacttttctatgaatataggaattaccgccttgtttggtgtaatgttcgtactgttccaaaaaccgctcgatttctgtttctc

SEQ ID NO: 36848 - DNA, 260 bp, Unknown
  Description of Unknown: RightRegion for integrase B10849 sequence
acgctgatcaggaagatcgtcattgacggcgaagacattattattcattggcggtttgcgtaagttgctaaacagtaagagtccatgttattagagtgtaaatgtttagcagtattgccggggctttatatattccatgttttgggagataataacaatatacagttttaaaggaggtcaccatgaaaaaagttttgttaatgatcatctgcagcatgttgctgatctgctcgtgcggttccaaggttccggacggtttc

SEQ ID NO: 36849 - DNA, 260 bp, Unknown
  Description of Unknown: RightRegion for integrase B10850 sequence
gattacatcgtatacgacaaggcaagtgagcatatcactattttttattctcgcacattataacattttgcaataagtcccaccaaactacaaattgttatagtactctaaaaccgcctattttggggagttttctttgatgtcattttcaagcaatcaacgatgagcgcattcaatctttttccatagcttcatctatcaccctgttaataaatccattcatgctttcgttatggcggtctgcataatcttttattcgt

SEQ ID NO: 36850 - DNA, 175 bp, Unknown
  Description of Unknown: RightRegion for integrase B10851 sequence
tttgttcatcatgtgactatatatgaagatcacattgaaattgtctttaattataaaaacgaactttcagagttccatgataaaactcttgaaagttcgcttttaaatgatttggtgacccagaagggattcgaacccctggccttttgattcgtagtcaaacgctctatccagc

SEQ ID NO: 36851 - DNA, 211 bp, Unknown
  Description of Unknown: RightRegion for integrase B10852 sequence
aaaacattaattaaacgtgtagaagttaaacgtgatgaaatcaacgttatttttaaattgtaaaattacagtatttaggagcacctactagaattgtagtacatgacatagcaaatattccttctttctataattcatttgcaattttattgattttgcgaagtcggtggttaacaccgctctttgttagggtgccttccaagtggtcagc

SEQ ID NO: 36852 - DNA, 260 bp, Unknown
  Description of Unknown: RightRegion for integrase B10853 sequence
agcatcgtggcgcacccatatgtggaagaggccaaagagtatgcagatgaggtggtggcatgacgagcgaggcatatcaaggcaacccaaggttgcgcaatgtgcgcattgaggtgaggggagcggcgcggcaaatcatggacggcactcagcgtgtgaccgtggtcccgctgacgatccgtcgcaaacaaaaccgcaagctgctgactccaccgccaggcactggggccaacgtcatgtccggtggcatggacattccg

SEQ ID NO: 36853 - DNA, 260 bp, Unknown
  Description of Unknown: RightRegion for integrase B10854 sequence
accgaggtccggttcgacccggacggcactgcgtcggtgtcgctggtgcgcggcgatggctgacaccgccctcaccctgacggtgcgggtgcccgtccgcgtcgccgcgccgccgcgtgtggccacccgcgagccggcccaagtagcgcgcatgctcgcactggcgcaccacgtcgaggccggcctcgcgtccgggcggctggtcgaccaggccacggtcgcgcgcgtgctcgggttcacgcgcgcgcggctgacccacc

SEQ ID NO: 36854 - DNA, 260 bp, Unknown
  Description of Unknown: RightRegion for integrase B10855 sequence
cttccggctaaaggtgcggaacgtttcaacgtgcgaacccgtatcgcaatgaacgagaggtaacccaacccaacaaggcaagttcaaacgagaggcccgcacgtttcgacgtgcgggcctcgtttcgtttctaggcatggttgcggcccccgagcccgtagaggcccgtagagaggcttacgaggcctcgtaacgggccatcccaacgaggcaagcaaacggcacggttctacggagcatcccaacggcgggaggcctcg

SEQ ID NO: 36855 - DNA, 260 bp, Unknown
  Description of Unknown: RightRegion for integrase B10856 sequence
ccgatagcgtccaatgccaatcgcatgagcggcagtcgctcctcgcgaggatcatcgtcgtaggtgcaaacggacagcagcagcgaatatgcgtggtagtgcgggcatgctgcggcaatggcgccctgaacctgggtccatttgtcccgaagccgcgcgatgtcaactgtgggcgcgttatcattgctggcgccccagaaagaggtcgcgacccgctcgctgagcgttgcagatttgctcctgatcgtcagaccaagaac

SEQ ID NO: 36856 - DNA, 260 bp, Unknown
  Description of Unknown: RightRegion for integrase B10857 sequence
cataagacggcgaagactcgcaggttagaggatattaagttagatatttatctcctaatatagctccataacatagaggatatgctaccctcttcataggtgttatgatgctttatgttattcaaagccctttatattttaccatagaagaaagattttttcaaaatctaaaactattattgacattcttactttataggtatatactcatactatcgacacaggttaacggatttaatacgaagtaggaagggagagct

SEQ ID NO: 36857 - DNA, 260 bp, Unknown
  Description of Unknown: RightRegion for integrase B10858 sequence
gacattgcacggcatcctctggtcgaggaaatgaaggagtccccggaggagtcttacgcatgagaactacggcgaaaccaaccatgagagctgacaatccccgactgcgcagcgtccgtatcgacatcggcggcgatgcccgcaactacaccaccggccaacagcgggtgacggtggtgccgctcaccatccgtcgcaaacagaaccgcaaggtcatgattccgccggccggtgatgactcgttgctgggtgcaggtggc

SEQ ID NO: 36858 - DNA, 260 bp, Unknown
  Description of Unknown: RightRegion for integrase B10859 sequence
agcatggacagatatgagattccgaagtatacaccgaggagaggcatagaaaaaccagtatgataaaatcataactggttttgtaaaagttatccatttttatgcactacgctatattttgtagaacggaactttatctgatggctcgtgcgtcaaattaatttcacctatcacagactgcaatcactgtcaatggcaagggcttcgccggcataaatgccccattgacagtgattttgtctatgatacagggcagccaa

SEQ ID NO: 36859 - DNA, 260 bp, Unknown
  Description of Unknown: RightRegion for integrase B10860 sequence
attatagaaagaatcgttttctatcgttccacttgcgacatagaaatatatttttatacttaaattcatatctttttacaattagcacctccctaccccaaaaagatataatatccgctgccgtcgcacacggagcggatatttttatctcacattttcgatttttctatcattttgtcgatgtactcctccaactcggctccgtcgtcaatgtcttcggttttatacacttccgcgtccgacatctgcgcgataaacga

SEQ ID NO: 36860 - DNA, 260 bp, Unknown
  Description of Unknown: RightRegion for integrase B10861 sequence
aaagccttgatcgatcggatcgatttcgacggacaagatatcacgatacaatggacgttttaattttttgagataaaagcagaaaatcgctcaccacggttttaaccgtcttgagcgattttcggtttttattacacaacgaaaaaaagagccgagagttattataaaccctcggctcccctttttacaatatagcctctcagacgctcagatttgccctcagagctgttttaatctctcaggcgataatttcctcgtcc

SEQ ID NO: 36861 - DNA, 260 bp, Unknown
  Description of Unknown: RightRegion for integrase B10862 sequence
gccttgatagatagaatagagataggagaacataagaccgttacaatcaaatggtctttttaattattacacattatacagaacgtcgatggactgtttcagtagttcatcggcgttctgtatcttttgtaatataacaaaaaaagacctccgagatattatactcccggaggtctgactatgcacgcagaaaccgccttagagcctcatatttcgccctcagcagttctttactgtctatatgatacaactttaaggtg

SEQ ID NO: 36862 - DNA, 260 bp, Unknown
  Description of Unknown: RightRegion for integrase B10863 sequence
gagagtggcacactgaagttccacttgcacgacaaggagctgctgacaacctcagcggaataggatcacaggagaaaacgtgaatcagcaaagcactggcaccctggaatacgccatccatttcaacaaaggccacaatggccgcaagcaactgcgtcaaggcaaggcgccggaacctgagaccttgccggttggcagcatccagcgggtttcgaaggtgatggcattggcgatcaagatggggaggatgatcgaagaag

SEQ ID NO: 36863 - DNA, 260 bp, Unknown
  Description of Unknown: RightRegion for integrase B10864 sequence
ccgtccgggcgcgggaaccgggtcttccgcaccgagacagtgcggctcatgccgcgcgcctgaccgtcgattcagcgaacattaaccccgccgtgaccgaatgcgaaacaaatcctccggtaactattgccattgcctgaacccagcgttaatgtctcgttacgcgcattaacgctggcatcccgcgcgccgcaattgcgtgccgatcgccgtgcactcggggaggggtgcggttccatgcgagtcaccaggccgctgtc

SEQ ID NO: 36864 - DNA, 260 bp, Unknown
  Description of Unknown: RightRegion for integrase B10865 sequence
tcagttttaatcgactacattagcattgatggtcagaaccttactatttactggacattttaaccattatccaatatcgattatttcttttcgtaaatcatcagtctgtttacagattgttcctttacgagataaatggtttatgttataatatccgtgtgaaggcggatcttcaccagtccgtttcactcccaacttaatataggccggccaggatcgcatggccggtcttttaatttgccccataattgccccacgaa

SEQ ID NO: 36865 - DNA, 87 bp, Unknown
  Description of Unknown: RightRegion for integrase B10866 sequence
aagcaattgatagatagagtcgaggttactatggataacatcgatattatttttaagttttaaaagcattatttaggcactacaact

SEQ ID NO: 36866 - DNA, 260 bp, Unknown
  Description of Unknown: RightRegion for integrase B10867 sequence
gccgacatcgccagccacccgctggtcgaggagtccgcgtcgactgaaggagcctacgcatgacctccaacgcgaagccggtcgcgcggccggtgaatccgaagctgcgcagcgtccgcatcgaggtcggcgacgaggcacgcaactacgtcaccggtcagcagcgcgtgaccatggtgccgctgacgattcggcgcaagcaatatcgcaaggtgatgattccgcccccaggcgaacggtcagtcctgggagcaggcggg

SEQ ID NO: 36867 - DNA, 260 bp, Unknown
  Description of Unknown: RightRegion for integrase B10868 sequence
gccgatatcgccaaccacccgctggtcgaggaatccgcgctgactgaagaggcatgcgcatgacctccaacgacaagccggtcgcgcggccggcgaacccgaagctgcgcagcgtccgcatcgaagtcggcgacgatgcgcgcaactatgtcaccggtcagcagcgcgtgaccatggtgccgctgacgattcggcgcaagcaatatcgcaaggtgatgattcctcccccaggcgaacgatcagtcctgggcgcgggcggg

SEQ ID NO: 36868 - DNA, 260 bp, Unknown
  Description of Unknown: RightRegion for integrase B10869 sequence
ctgatagacggcatcattatccggcctgatgatggcgttgaaatacactgggctttcgcctagtgtatcttgtgcaggctaattatgacctccacatgcatggagtgtagaagtagcctgttttgcccccttgttgttaataatattatattggcgataataaaaaaagaccgggatctctcccggcctctgtttgaaaattattaaaatcctatcgctgccttgtatgtcttcggacctgctactgcatccatgacaag

SEQ ID NO: 36869 - DNA, 260 bp, Unknown
  Description of Unknown: RightRegion for integrase B10870 sequence
cgttctgtggtctctgagatatacatctatccggacggtcgaatcgaaccaaagtttttttaatgcgcatagttgtactaacctatgcgcgccgttcggagcgatgcagttagtacaacttttcagagcacaaaaaaagaggagccgagagatcggctccttaattttttttttttattgtggagtaacgctcatcagtttacagtcgatgacgctagtcgggaaatagtctccggatcggatgcgatcctcaagttcgt

SEQ ID NO: 36870 - DNA, 260 bp, Unknown
  Description of Unknown: RightRegion for integrase B10871 sequence
attgtagataagattgtttttgatcgtaagaaatgtcttttattttttgatattaatttataggttattacagtatggtggacccgatggtaattacatatactaatttggtggagggaattctaaattgttttttcaacttagtagctatactagtcacatttttctaaatacaattggtataaatcttctccaattaaatatttcaacttttgtctctctttataaaatgattcatccacccaggaaggattattaag

SEQ ID NO: 36871 - DNA, 260 bp, Unknown
  Description of Unknown: RightRegion for integrase B10872 sequence
atcaaggagttcacgctggatgataacaagaaaatcgtgccggagagcattatatttttttaaataattgttgtactttttaatgctctccgttcggagcggtgcaaaaagtacaatgttagaacgagcgccgcaggccttggtataacagcattatacaccattatgacaaaagaaaaagccccggaaggctcagccctccggggtcttttctatttcttctcgtgctgggtgccgaagtagaaggcgaccaccgtgga

SEQ ID NO: 36872 - DNA, 260 bp, Unknown
  Description of Unknown: RightRegion for integrase B10873 sequence
ctcattgagaaaataaccgccgataatgtgaaaaaggaaatcactatatatttttacgcttgacgcagcaacgcttctattacttccccagcgtctgcatttataacaatgctgcggtctgctatttcttccggggcgtaggcttccccgtagtttatgcaagcataggttgaaagcctattttcttttgtcagcctatggagtacaaacttaattattacgggggtatttcttaactttgtactccctctcaaatggag

SEQ ID NO: 36873 - DNA, 87 bp, Unknown
  Description of Unknown: RightRegion for integrase B10874 sequence
gatattgagggcatagctccaccaaaaaaaggacttgcttttcagcaggtcctttttccatgaaattcatttctgcgcaacgcgcaa

SEQ ID NO: 36874 - DNA, 260 bp, Unknown
  Description of Unknown: RightRegion for integrase B10875 sequence
ctggaacgcaacgagttcgtggccgagcaacgcgcaccgatcgacgcggagacggtcgaatgagcgacggcatcaaaccgataagggagacgcctgcaggacgccgggtggtagtgagggcttcaggcacgccgcgccagttcgaggtcggcgggcgatccgtgacgttcgtgccgatgttgatcaagcgccggcatcgcagcaaattggtggtcccgccagtaggtacagattttgtgaaggccacttcgtcattcgac

SEQ ID NO: 36875 - DNA, 260 bp, Unknown
  Description of Unknown: RightRegion for integrase B10876 sequence
gacatcggcgcacatccgctggtcgaggaagcccgcgaacaaaccgaggaggcgctggcatgaacaccacggcgaacccgcgcaagcgcaccgtccacatcgaggtcggcgccgaaacccgcagctacatcagtgccgggcagcgcgtcacccaggtgcctttgatcatcaagcgccgccagaaccgcaagttgctgatcccgcctgcatccggtgccgcagacgcgatgggcggcttggacgtgccgatgatcaagacg

SEQ ID NO: 36876 - DNA, 260 bp, Unknown
  Description of Unknown: RightRegion for integrase B10877 sequence
gacatcagcacgcatcccttgatcgaagagtcccaagaacgtgtcgaggaggtttgggcatgaatgccacgagccaccagcaccagcgtgccgtccgtatcgagatcggagccgaggcgcgcagttatgtcagcgaggggcagcgggtcaccttggtgcccctgacgatcaagcgccgccagaaccggaagctgctgataccgccagcccccgaaattgcggaccggatcggtggcttcgatgtgccgatgatcaaaacg

SEQ ID NO: 36877 - DNA, 260 bp, Unknown
  Description of Unknown: RightRegion for integrase B10878 sequence
ctatctattattgataaaatttatatagaaaatggcgaaatacaagaggttacttttttgtaacctctttgctataacccctgttcttttcaaatttctaattgtcactttgttctggtgcaccaactgggcaacattatcaaagtaacacttttttaattgcttaagttaaatccttttttcacaccacttttgtaggcttctatgaattgtttttttaataatttaactaaaattcttttcctccaatttaatccatc

SEQ ID NO: 36878 - DNA, 260 bp, Unknown
  Description of Unknown: RightRegion for integrase B10879 sequence
gaactcgagcgccaccaattcgtggccgagcaacgcgcaccggccgacgaggagactgtgtgatgagtaccatcgaaaagcccacgcgagaaacgccagcggcacgccgtgtcgtggtcaccccatcggggaagccaagggatttcgaacttggcggtcggtcggtgacgttcgtaccgctggcgatcaagcgccgccattccagcaagttgatcgtgccaccaatcggtacgtcgtttgtcagaacgccttccacattc

SEQ ID NO: 36879 - DNA, 260 bp, Unknown
  Description of Unknown: RightRegion for integrase B10880 sequence
gacaaggccatatcggttgaattgaatccagatataggtggtgctctaattcatgttaagtaatcgatgtaatccggacggatcacattatttacttaacaaagccgcctgatttattccatgagaaagccccccaaggtggcgggggcttttcattccttaggggagtctatcgacaatagcatccaagagatgtgctggggaaagttgatacgaattaaagtcccgaaccatattcagtacgaagtcggcatccaccg

SEQ ID NO: 36880 - DNA, 260 bp, Unknown
  Description of Unknown: RightRegion for integrase B10881 sequence
gacctgatcgaccggatcgaatatgcggacgatgatctgcggattttctggaaaatcaaataaaaaaagagcacccttctcggtgctctttctttgtttcgcgattaagtaccatctttaaagattgagtgtcgaatcacgaaaccggtcaaaattcgccgcgatgaacagcaacatccacgccccgccgccgatcatcatcttgacgcctcgctccagatccgccgccagcggtgactccgtgaggcaggcccctgcga

SEQ ID NO: 36881 - DNA, 260 bp, Unknown
  Description of Unknown: RightRegion for integrase B10882 sequence
gacctgatcgagcggatcgagtatgccgatgatgacgtgcggatcttctggaaactgaaatgaaaaagagcacccttctcggtgctctttctttgtttcgtgattaggtcctctctttaaagattgagtcctaaatcacgaaaccggtcaaagtttgccgcgatgaacagcagcatccacgccccgccgccgatcatcatcttgacgcctcgctccagatccgccgccagcggtgactccgtgaggcaggcccccgcgaa

SEQ ID NO: 36882 - DNA, 260 bp, Unknown
  Description of Unknown: RightRegion for integrase B10883 sequence
aaggcgcttgtcaagcggatagagtttcaaggtcaagacatttcgatttattggaatttctgattattgcattttgcagaaaatagctattgacggttttaaccgtgaatagctattttgtgcgttttctcaatctgcaataatagaataacaaaaaaagagccggagatcaatagcagatccccggctcgcgtcgtatcgtgtttagtttagcctcagtcgcccaaattagcccgtctgagccgctttaccgtttaggt

SEQ ID NO: 36883 - DNA, 260 bp, Unknown
  Description of Unknown: RightRegion for integrase B10884 sequence
tctctcgttgaaaaagtagaaatagacggacaaaatgtcgatatattttggaaatttgcataaaacaagcaaaaacggcattaaactgccgtttttgacattttgcaaattattccctttgctttaaccacggtcacaatttgctaataatttaaagaggcaggtgtttcctgcctctttgttatatgttgagtatttccagaacattgcaatcaagagcgattgcaagcttggcaacggtgatcgccgttgctttgttt

SEQ ID NO: 36884 - DNA, 260 bp, Unknown
  Description of Unknown: RightRegion for integrase B10885 sequence
attaaatcagtgaccctctgtaatgaccattctaacatgatctcatctattctatttttataattagttgtaactgcttcaatccacagggaatgaagtagttacaaccaaaaaatatcaggatgttatacctttgtgtgtagtccagtgctttaacatattggttccccggaagcgggaagttaatatgtcaataatcagaaagaaaaaagcggggctaaaaggccccgcttccattacaatatcaactttagaaatgt

SEQ ID NO: 36885 - DNA, 260 bp, Unknown
  Description of Unknown: RightRegion for integrase B10886 sequence
ccggggtggcgtccgggcgagtcgtatttcgacccgcgggccgtagctattgaatggcaatagcctgtcgtgcgggtacatccccattcaattgttaattgcacccctacattcccgtgctttattaatctttatcaaattcaccatcaattgcttgtttcaacctgatcggtgtgtcaccattctcaacaggtcggcaggtagcccgccgacctcggatcggccagaaaccgttgctgggccacaaattcaccagcgat

SEQ ID NO: 36886 - DNA, 260 bp, Unknown
  Description of Unknown: RightRegion for integrase B10887 sequence
gtactcgttacgcacaaggtcgccgagcacctcaacccggacacaatcgaccccgagtggtgacaaagtggcagaactaacgtcattctgtattactttgtcgagcgctctctctctctaacaagtaatacaaagtgacgcttatatcgccactttgtcacccccggcagcctcgggcaccgcccgcaccccctgaaggtgcccgtgagtcgatcctgagcccatggccctctcccctgtcgtccacatcgaaacgacta

SEQ ID NO: 36887 - DNA, 260 bp, Unknown
  Description of Unknown: RightRegion for integrase B10888 sequence
ctggagagaatcgacttccatgacggtcttcccaggatcaccttcgccctaccagagggttaggaacgagaacaccttcctaacccaacggtagagacgacaaaaggccccgtccagggcgattcgggccacatgggccaaaaccaccccgaacggggcagggtgccggttagaacgcaatagcgcccagggcaatccccccgagaaggaaaaaccacctctcgttcgccaggattcggctcctctccttttccctggcc

SEQ ID NO: 36888 - DNA, 260 bp, Unknown
  Description of Unknown: RightRegion for integrase B10889 sequence
attaaagatagaaatcaaaattattttacagaaagttctattaaaaacataatttataagtaaaaataaatttattttaatttaaattatttaattttttttattaaataaattattaaaatataacctatttatatattaaataacataaataaaataaaaagaaaaagaaaaagaaaaataatatatatattaattaataaaaatgaataaagacaaaataactactgaaaaaatgtctgaaaattttacaaattatc

SEQ ID NO: 36889 - DNA, 260 bp, Unknown; identical to SEQ ID NO: 36431
  Description of Unknown: RightRegion for integrase B10890 sequence

SEQ ID NO: 36890 - DNA, 260 bp, Unknown
  Description of Unknown: RightRegion for integrase B10891 sequence
catattgtggtaaaggacgggcggtacggccattttgaccttgacgttatttttttaccctaacattgtattagtacatcgtgccgccaggtgcgtgcgcttaatacaatgttataaataggtagagaaaagcccaggctgcgcgcctgggctttgttgtttatacttcgccgtaggaggttacggcgggatcgtccacgatgtacaggccagacagcagcctaaaccacggctgcccgtccaggccctggacgcgggcc

SEQ ID NO: 36891 - DNA, 210 bp, Unknown
  Description of Unknown: RightRegion for integrase B10892 sequence
cgtatcgtggtaaaggacgggcggtacggccacatcgaccttgatgttatttttttgccctagcattgtattagtacatcgtgccactcggtgccgtccagcctcatgtagaagctgaccgcacaggctgtaccgtcatcgccctcgtagtcatacatgaacagcgagatgctgtcgtcatacgggtacaggttgaacttatacgcatcg

SEQ ID NO: 36892 - DNA, 260 bp, Unknown
  Description of Unknown: RightRegion for integrase B10893 sequence
caatctcttatttattatatcgaaattgacaatgaagaagtaactatccattggaaattctaaaaaggagctgtctacaatgaaagatttactaacactattagcggaaaccttttccaaaatcgaacagcaaaaaatcaaagagtacctaaatactaaataggggatgttggggaaaaccttgtcgcacaaggcatccccacttatgccatatagggagtcccgacttatctgcactccccttatggtatacaccttcc

SEQ ID NO: 36893 - DNA, 62 bp, Unknown
  Description of Unknown: RightRegion for integrase B10894 sequence
cgtatcgtggtaaaggacgggcgatacggccacttcgaccttgatgttatttttttgcccta

SEQ ID NO: 36894 - DNA, 260 bp, Unknown
  Description of Unknown: RightRegion for integrase B10895 sequence
cgatctcttataaacaaagtcacgataaccggacatcgtattcacattgatttcaaaatttaaaatgtactcgacatcagatagtcattccgatgactgtcacatgtcgagaaaggcaaatgaggtacagatcatgacaagaaaagctgctctgttagaagccatagaaattatcaaaacaatagaaattaatccagaacataaagagatcctactcaaaaagttacaatcatgcgccgacgatctgccctataataaat

SEQ ID NO: 36895 - DNA, 260 bp, Unknown
  Description of Unknown: RightRegion for integrase B10896 sequence
ttaaataaagatgaaataaatttaaaaaatgataatttaaaacttcaaatatttttaaattgaaaagctagaggaaaaatctagcttttttatttttttcatactataataaaacataatcaaatattttaagtatgctaagggtagtataaaactaagttcccacctaggcaccattcaatccctcactttttatagtagatgattgaaatatatatatgttagcaatgcctctggatcaaatggtctgaggccttttt

SEQ ID NO: 36896 - DNA, 62 bp, Unknown
  Description of Unknown: RightRegion for integrase B10897 sequence
catattgtggtaaaagacgggcggtacggccactacgaccttgacgttatttttttgcccta

SEQ ID NO: 36897 - DNA, 260 bp, Unknown
  Description of Unknown: RightRegion for integrase B10898 sequence
gaagatacccccgcaactcatggccgtgggggtgtatatgacttccatgttgagttttattaagcatgccttttataccacccgtaaaatgtcatgccctttaggtgatgtcaaattactggtggtaatacttccatccctgttcgggcacgtgactggcaatgcaatcggtagcttatataccttttcgccatacctttcctttagataatcagaaaatactcgatacacttgatgctccattattattcctttcacgc

SEQ ID NO: 36898 - DNA, 62 bp, Unknown
  Description of Unknown: RightRegion for integrase B10899 sequence
atagagaaggtcatagcacataaaacatcagagggatacaactttgaaatcttttataaata

SEQ ID NO: 36899 - DNA, 62 bp, Unknown
  Description of Unknown: RightRegion for integrase B10900 sequence
gaagatacccccgcaagccatgggaaaggcggtgtttatgatttccaggtggagttctatta

SEQ ID NO: 36900 - DNA, 260 bp, Unknown
  Description of Unknown: RightRegion for integrase B10901 sequence
tctaaggctggcgtgcgggtgacgtttcgggagcgggacctacgatcacggtttcgggcgtgaacgggaaaccgggccaggccgcgtcgaatgcgtgcccggccgggcagtgctggcgggccgtgtcgcggccctcggcccacttgccggtgacctcgagcccgcagcgggggcagtcgatggcggcctcgcgctcgatcggggccgaggggtcctcgagcgatacgaacgccgacacgtagcggctcacgcctggagac

SEQ ID NO: 36901 - DNA, 260 bp, Unknown
  Description of Unknown: RightRegion for integrase B10902 sequence
caaagcctcatatcccgcattgtcctgaccgacgaccaagttgatattgagtgggcgttttagcacaaaagaaaaagccctcctgcacaggaacaatcctgcacgggagggcttttggcttacttggtttcggcgttcagctgagatactgcgatagtggcggcggtggcagccgcagtgctggcagccacttcggtggcgccgctggtagcggacgggagcgcaatcttctgacggcgcacctcggcttcaattttagt

SEQ ID NO: 36902 - DNA, 260 bp, Unknown
  Description of Unknown: RightRegion for integrase B10903 sequence
gggatgcggcggtttaccgcttaccccaaagatgaatatgacgcattcaaaagagaggactgatttatatggcaagagaaatcgtacacattcctgcacggcgtggcctgagcaatcgagctactgtgacagaccgaaaaatccgggtggctgcttattgccgagtttccaccgaccatgaagagcagatcaacagctttgaaaaccaggtgacctactacaccgaatacatcaatcggaatccgaactacgaattggct

SEQ ID NO: 36903 - DNA, 62 bp, Unknown; identical to SEQ ID NO: 36490
  Description of Unknown: RightRegion for integrase B10904 sequence

SEQ ID NO: 36904 - DNA, 62 bp, Unknown; identical to SEQ ID NO: 36491
  Description of Unknown: RightRegion for integrase B10905 sequence

SEQ ID NO: 36905 - DNA, 260 bp, Unknown
  Description of Unknown: RightRegion for integrase B10906 sequence
tcccaactgatcaaatacatatctgtaaacgctgattctatcagcatacactggaggttttaattttttttatatttttatctaacttttatcattcatttcaccggacgattatgacaaaattgtaaccggtgatctcggaaaagtcggacagcgcgtcctcttagaccttttacagacctccggtatcgaccttggggaacgccacatggactgcggcattgaaatttacgactgcaaaaagcaggacacgcacgcgg

SEQ ID NO: 36906 - DNA, 260 bp, Unknown; identical to SEQ ID NO: 36576
  Description of Unknown: RightRegion for integrase B10907 sequence

SEQ ID NO: 36907 - DNA, 260 bp, Unknown
  Description of Unknown: RightRegion for integrase B10908 sequence
tttatagcatatattatatatgaccgcttgaatgataatataacgctttttttaaacccttaattacaaacatttacaaaaaggcggggcgtgttgaaaatgtttgcaataaaaaaggggctaccgtaaagatagccccaattgcttattttgtcttaagtatgccaccgagttttttgatgaaattctcgcctgctactccattctgcttgtacccccactttttaaggcactcgtttacggctttttctgtgccgtta

SEQ ID NO: 36908 - DNA, 102 bp, Unknown
  Description of Unknown: RightRegion for integrase B10909 sequence
attgaccatatcgagcaggatccggataatccctgcgacaactggattgttttttttaagtaattcgacttactaaccacatacctccatgagttattatta

SEQ ID NO: 36909 - DNA, 260 bp, Unknown
  Description of Unknown: RightRegion for integrase B10910 sequence
gaaagcctcgtgtcccgcattattctagacaacgacaatgttacaatcgaatgggctttctgacgacgcaaaaaaaatccgcaacgggatagctgtcccgttgcggattttcatgcgcctttccgaacagataactctcaactctccctgtccttgatgatgtccctgaacaccatcaccgccacaccgattactatgccgtttatcaatatctccacgacttgcttcgtgaaaccaaacagcataaaagtcggcagagc

SEQ ID NO: 36910 - DNA, 260 bp, Unknown
  Description of Unknown: RightRegion for integrase B10911 sequence
cattcacccaaaagggttgtactagacacgacattttcctgcggaaaaatcgaagtagaataaagcccctccagtcgaaaccgaaagggctagcgaaaaagccactctactttatacattcgcggttatagagtggccttttcggggagacaggactatcatcctgaatacgccaccatgatataatggattgtaggtacaaacaatgaaacgttgccatcgacaagagttcttttggactattataagctatatgttat

SEQ ID NO: 36911 - DNA, 62 bp, Unknown
  Description of Unknown: RightRegion for integrase B10912 sequence
cagtctctaatttactatatcgaaattgacaacgatgatgtgatgatccactggaagttcta

SEQ ID NO: 36912 - DNA, 260 bp, Unknown
  Description of Unknown: RightRegion for integrase B10913 sequence
actttgatcgaggcgatcattatcgacggcgaggatattacaattaaatggagattttcgtaaggctaataattacctccacgttgaccgaggtatttattagcctgtacgcttttaagcgtacaaaatgcacaaaaaccggcctaaaactttgtacagtactccgtcttgtaactatacgcttataagcgtatactataatcaagataaagataacaaacatacaaacggaggatataaaccatgtttaagactaacga

SEQ ID NO: 36913 - DNA, 260 bp, Unknown
  Description of Unknown: RightRegion for integrase B10914 sequence
gcattgattcacaagatagtgatagatggggaagatatcgagatttactggacttttgggtgatttttttctttttcgcaaattttagccttgattttattcgtggctacaatttgcaaaatgtgatataattcaagtgttgtctttttgtttcgtgagttttccatagaacgaaatcctttctctgaaagagccacccggaatggatggctcttttactttatcgcatatccttgcggattaactctttgatgtagcct

SEQ ID NO: 36914 - DNA, 260 bp, Unknown
  Description of Unknown: RightRegion for integrase B10915 sequence
gtacgtccgtcggcgaagggcccgcggttcgacgagaagtcggtcgacgtcgaagacgcgtaaggccgcctgcggtgcgggatttgggcaccggcggcggcctgggaagtggcaagcagcgaaggggatgttaggtggcgaccctcgccgagctgcggcgccgagcgcggcaacaggccttgatgtagacctggttggcgtactcgcgcgccgcgggattgtcgacgatgaccgtgctgtcgatgacgcagtactcttcg

SEQ ID NO: 36915 - DNA, 260 bp, Unknown
  Description of Unknown: RightRegion for integrase B10916 sequence
gctgcggtcaagactatcacggtaaattcggacggtacgctcgtgttcacctgggatgcttgatgttatcactttatagggaaacgcttcagtgtttccacttcaagtgagaacaaagaccctcaccgaagtgggtccttatcgacatggcataaactgatgacgcaaattcaagttgaaggaaatgggtgtttactatcgaatatctttacttgtccaattttgtgaaaacgatatgaggtgcgtaaatgtcaaacatt

SEQ ID NO: 36916 - DNA, 260 bp, Unknown
  Description of Unknown: RightRegion for integrase B10917 sequence
tttattgatagaatagtattttgtggaaatagagattatgatttcatagtctatttaaaataaatgctgggcttactaacatactatctcctttcggcaagtgtgatttagtaagccaaaaaaaagaagtcagatattactctgacttttgttatatattataatttttgttaaatttttcaaataaaaaaatattatcttactcttattttttgacctgcatatatcaaattaggatttttaatattattccaagcaac

SEQ ID NO: 36917 - DNA, 260 bp, Unknown
  Description of Unknown: RightRegion for integrase B10918 sequence
gctctgatccggaggatagaattaaatggtgatgatgttaccatttattggaatttcaaatgatcatactgggaaataggttacaacgcatttcccactgtgagcaaaagaggcagaatgtttattcctgcctcttttctttgaacaactcaaaccatgcatctaatctgccggaaatatcatcaatcacttcctcaggatagcaagcaccctcatccactgctttctctgccagatcggaaagagcctgcttcaggtac

SEQ ID NO: 36918 - DNA, 260 bp, Unknown
  Description of Unknown: RightRegion for integrase B10919 sequence
gatcacgtcgaggtgttccccggacatccgcgcgctcgcattgtggtgcacccacgcgaataggtggcaacaggtagcagtcaccctcatgaatagtgtctaatgtcaccatgtcgaagaccacagtacgcacagcacgtgagccagtgcaggacgaactcaagcggctcgacactcctgtcgggttcagagatgcagtcgcggcgctgcgcatggtccgtctcgacgtcgacgagcgagccgccatgcgtgaggtatcg

SEQ ID NO: 36919 - DNA, 260 bp, Unknown
  Description of Unknown: RightRegion for integrase B10920 sequence
gacaggatcgaagtagactggatgggcaaggaaaaggaaataaagagggttacttttttttaaccttttgtttgtactaactcaccattacggttccgcaaggtatcgttagtacaataaaaagaaacccctggggcagcaagctccaggggtttcttgactttttacttgagatatgctttggaacagtacccggttttgccgtccgctacgccgtacagccagacggaggagccgtttaggttgtaatagccatagca

SEQ ID NO: 36920 - DNA, 260 bp, Unknown
  Description of Unknown: RightRegion for integrase B10921 sequence
cagctaatcgacggagtgtatatcaacgctgagggagagctgcgcattgagtggtcgctgtagcgggggattatattactgaaaattatcatatatgacaataatacaacaaagcgtacacctgttccatggtatatcttggagcgaaaaaacgaaaaaacagccacgggacggcatcctgtggctgtttgacattttattctattgacatttttgtgactattctgtgtcagaattttgacaggttacagaccgagttc

SEQ ID NO: 36921 - DNA, 260 bp, Unknown
  Description of Unknown: RightRegion for integrase B10922 sequence
gagtccctgatcgatcgtatcgagctggatggccgatccataaccatccgctggaaattttgatcatatgcaaatggtctatcccattacaatggcatattccatttgctaaaacagagagggcgggatctctcccgccctctttttacagcctgtcgctcaccgtggggttgttgacgatgccgaagatcgccagcagctcgccgatgatggcgatgatcttctccaccagatcgctggtgagtccccatttttccagc

SEQ ID NO: 36922 - DNA, 132 bp, Unknown
  Description of Unknown: RightRegion for integrase B10923 sequence
tctgtcattaaagaaattagaattgataatgaccagaatatcacgggtgttgtttttgggtagtgttgtactaatgtgacactacccgtgggttcatcagccaggatcagggatggatttcctgccagcgcc

SEQ ID NO: 36923 - DNA, 260 bp, Unknown; identical to SEQ ID NO: 36471
  Description of Unknown: RightRegion for integrase B10924 sequence

SEQ ID NO: 36924 - DNA, 260 bp, Unknown
  Description of Unknown: RightRegion for integrase B10925 sequence
cggtctgtaatccaagaaatccgcatcgaccgggagcgcaacattgccattaattttttgtaaaaaacatgggtactaactattcgcatcctaaccgatacatatagttagtacccacgcatacaatcatccgttcgattcaatcagcttgtatcgtttgtccggtctctgaatctcctcaagtttcttcatcgcgatagttctcatcgcggtcctgaacacaactctttcgttgtcggacgtatcaataatccgataca

SEQ ID NO: 36925 - DNA, 260 bp, Unknown
  Description of Unknown: RightRegion for integrase B10926 sequence
tttcagctggtggacagcatacatatcaatggcggggatgtgcgcattgagtggtcgttgtaaggaggataggtattaataattttggtacaattcgattttatcacacaaaagcacatatgttcgatggtaattgtcggtaaaataagaaaaaacacacgatttcgtgtgtttttctttacgttcgcaggatttttatttatcaagtccgagctcacggattttcttttgtacaaagtctgcaaaggcgatattggcga

SEQ ID NO: 36926 - DNA, 166 bp, Unknown
  Description of Unknown: RightRegion for integrase B10927 sequence
aagtccttcgtgcagtcaatcactgttcacgaggacggagaaatggatattgtttttttatgatcttgtttctactaactacgcaccgcccgtcggctcatctgcaaatataatttccggacgattcaccagtgctcttgcaattgctactctctgctgctgtcct

SEQ ID NO: 36927 - DNA, 157 bp, Unknown
  Description of Unknown: RightRegion for integrase B10928 sequence
aagtccttcgtgcagtcaatcactgttcacgaggacggagaaatggatattgtttttttatgatcttgtttctactaactacgcacctcctgtcggctcatccgcaaatataatttccggacgattcaccagtgctcttgcaattgctactctctgc

SEQ ID NO: 36928 - DNA, 260 bp, Unknown
  Description of Unknown: RightRegion for integrase B10929 sequence
tggggcggcgttggagtgacagtccggcccattcgggcgggccgcatagaccgtgcggtctgattacttgtgactcaagatctttcgaataggcggggtaacgttccggcaaaccagtgggtcgtccattcctaaaccatgcggttggaactatgatccacgtcacgtgacatggcacgtgacccggtatcccggggttgaggtgaggtcggggtagtactgagaggggcagacgaaatgcctgaacaaggggattcgtc

SEQ ID NO: 36929 - DNA, 96 bp, Unknown
  Description of Unknown: RightRegion for integrase B10930 sequence
atagaaaaaagaaaagtattgaataaaagtgaaataaatatagttaatgttatttttaaataaaaagataatactcttatacgttagttttaactt

SEQ ID NO: 36930 - DNA, 260 bp, Unknown
  Description of Unknown: RightRegion for integrase B10931 sequence
caggacacaattgagctacagttgctttatgtgccagcgaatctcaaagagaaaaacgtgtaaaagcaatgttgtagccatctccccaagtgcttttgcacgttatcttgtcctgactatcccaaggccagatagacccgcatcaccattgggcaggcaggcatggggttggcacatcaggcaagtgcggcgaatccgcggaattgacccacggcaagcagccaaagagatcggcatcgcaagacagacgctctatgggt

SEQ ID NO: 36931 - DNA, 260 bp, Unknown
  Description of Unknown: RightRegion for integrase B10932 sequence
cttatcaaaaatatcatagttgacggcagcagaatcacagtaaatttacggctcaaaaaataattcaacttaaaaaaagaggcttttttataacaaaaacctcttttttttcttgacaaatatatttaacggctctaaaatagaggtgaagctcagaaaaattgaatagtccattggcgcaataatgaagtaacgctataaatattaacttcaatagggcgataaaatattatatcggaaacataagctcaatatcgaaa

SEQ ID NO: 36932 - DNA, 260 bp, Unknown; identical to SEQ ID NO: 35603
  Description of Unknown: RightRegion for integrase B10933 sequence

SEQ ID NO: 36933 - DNA, 93 bp, Unknown
  Description of Unknown: RightRegion for integrase B10934 sequence
gtaaaaaaagtgaacatatacgataagcatacaatcaacatagttgatattatttttaggtaaaaaaatacattctcttatacgttagtatta

SEQ ID NO: 36934 - DNA, 260 bp, Unknown
  Description of Unknown: RightRegion for integrase B10935 sequence
gccctgatcggcgagttcgcccggagaggcatcggcgcggaactggtggaggtggaggcctgatgaacgacacactggaaaccttcgtgccactgacattccgccgccggggcgcgcggcgcgtggccgccgacgaccgccatgttcacgatgtgacgttgctggagggggtggcacgcggtttctactggcagcacctcgtggacaccggcgagatgaagagtggctcggagatcgcccgggccgaaggcttacaccca

SEQ ID NO: 36935 - DNA, 260 bp, Unknown
  Description of Unknown: RightRegion for integrase B10936 sequence
atgcccgttcgttcgggtaagcgtatcgaccctgcgcgcctgaaaatcaagtggagattttagctgtcttttagaattcgcggttgcgccatgggttatgaagggatgcttttgcggcaggggaaccggaaaatccgtacaaaaaaaagaggccccccacgtggaggggcctcaaacatccgctctggcaatcactcaggcacaacggtcgtcttaccgtctatccactcgaccagtttgctgtcgcgccaatacgcctg

SEQ ID NO: 36936 - DNA, 88 bp, Unknown
  Description of Unknown: RightRegion for integrase B10937 sequence
agagagctgatcgacaaggtgcaagtcacatctgacaagatagttattaactggaagatttgagaaatttacttacgttcatttcaat

SEQ ID NO: 36937 - DNA, 260 bp, Unknown; identical to SEQ ID NO: 36533
  Description of Unknown: RightRegion for integrase B10938 sequence

SEQ ID NO: 36938 - DNA, 260 bp, Unknown
  Description of Unknown: RightRegion for integrase B10939 sequence
cgttccattgtcaaggaaatccgtgttgaccatgacaaaaacattcatattatttttttatgattgttatactactaactgaacccctccggtcggtaggttcaatttagtagtatgaaaatctctgttattttttacgtattttacgtatatttttattgacattacgtaaaatacgtgttattatatacttgtaaggaggaaacaatacaaatgagatttcgagaaattgaaaaaatagtcctcaatgacggatggga

SEQ ID NO: 36939 - DNA, 62 bp, Unknown
  Description of Unknown: RightRegion for integrase B10940 sequence
cgttccattgtcaaggaaatccgtgttgaccatgacaaaaacattcatattatttttttatg

SEQ ID NO: 36940 - DNA, 260 bp, Unknown
  Description of Unknown: RightRegion for integrase B10941 sequence
ttcgatatcatccgacgtatagatatcgatggtgaagatgttaccatccagtgggatttctaatcaagtttgaaccctatatcgttttgtttcttaacaaatactatttcagaccctttgtaacaattcgttttagcatattgttattaagacattaaaaaaagacccctgagcgtaatgcccaggggtttaaccaaaataaagcacaaagttaaggctttttataacgtattaaacatactgaatcactatgtttatat

SEQ ID NO: 36941 - DNA, 213 bp, Unknown
  Description of Unknown: RightRegion for integrase B10942 sequence
tgcataagcaagattagcatagaccccgaaacaaaaaagtttacgttttatttttttgcataaagctgtatgaagtttgcgtttagttgtctaatctttctgacacttgtgttcgctcctgctcatacttggaaaccatttcttggtacaattcaacggggatagtgccaagagcataatcctcatacatccggctgattatagtgtacaatt

SEQ ID NO: 36942 - DNA, 260 bp, Unknown
  Description of Unknown: RightRegion for integrase B10943 sequence
tccttcgtggacaccatacgcattcgtgaagacggcagcatcgccgacattatttttttatgataatgatgcacctaattcagcgttgcccgaaggtgacgccgaattaggtacatcttttttcttattccgggatgaactccacgtcgcccggcctgccgctgacgaagtatccgtccgctgtctggtacaggacgccgtccggcgtggtgaacttcttcacagccttcttcatatcgaaggccgtcacgccgcagatc

SEQ ID NO: 36943 - DNA, 260 bp, Unknown
  Description of Unknown: RightRegion for integrase B10944 sequence
tcagcggtggtatcaggtcgcgccgcgtccggtaaccgccgaatcgtgacggtgtggcggtaggtcgtgtcacaaccgtaccgaaatgggtacggttcagccctccgaataaacggaactatgacggacatcctcaaacgcgcccctatctcattagagtgcatgtttatttataaaactgtacaagcaatagagatagggactcagaatctgatgtccgtcatattgccgcttattcactgctcctagatcgtctgggc

SEQ ID NO: 36944 - DNA, 260 bp, Unknown; identical to SEQ ID NO: 36115
  Description of Unknown: RightRegion for integrase B10945 sequence

SEQ ID NO: 36945 - DNA, 260 bp, Unknown
  Description of Unknown: RightRegion for integrase B10946 sequence
gttgtaatatacagagaaaaagggaagttcaagaagattacacttgactatactttaaaatgaccccaacctgtgtaagagttaacttcgcgcatgcaaacttaacttttatacaggttagggacgatgtattattttcaacgataatactttaaataaaataaaacatcaaggcggagctttcactccgccgcttctccttcccacatctcttcgagtgcctcctcaacaaactcacacactgccaacactccttcgat

SEQ ID NO: 36946 - DNA, 260 bp, Unknown
  Description of Unknown: RightRegion for integrase B10947 sequence
ccgacgcaggcgggcatcccgcgcgacgccagcgcgctcacgttcgagccgttcgtcgagtaaccgccgggctgcccgcgccaagatgcggtcaacttccgcggccacgcgcggcggcagcggaagtggaaccagtccatgggagtcctcgtcgttgagcacgggcgggtcgtctttggccgcaggtgacatgtctgtcagtatctggcgggccagacctgccgtcgatgccaacgtcaggacacacaagctgactgtct

SEQ ID NO: 36947 - DNA, 260 bp, Unknown
  Description of Unknown: RightRegion for integrase B10948 sequence
tccttcgtggacaccatacgcattcgtgaagacggcagcatcgccgacattatttttttatgataatgatgcacctaattcagcgttgcccgaaggtgacgccgaattaggtacatcgtttttttattccggaatgaactccacgtcgcccggcctgccgctgacgaagtatccgtccgctgtctggtacaggacgccgtccggcgtggtgaacttcttcacagccttcttcgtatcgaaggccgtcacgccgcagatcg

SEQ ID NO: 36948 - DNA, 260 bp, Unknown
  Description of Unknown: RightRegion for integrase B10949 sequence
cccggtcgcaagggactcgatccggcccgggtcatcttcgagaaggggttggccggatcgtgacaagacaccatctatccccgttggtagtgcttgtatgacaccccatggaacagcgggacgatcttctagaccagatacgggaacgactcggggacaacgccgatcggtatgacctcggcgggatcgtgcaggcgatcctggacaggtacggggacgtcgccacattggattacatcgatccggacacgcttcatgcg

SEQ ID NO: 36949 - DNA, 260 bp, Unknown
  Description of Unknown: RightRegion for integrase B10950 sequence
ccggcgttgaagggccggaaccggttcgacccgtctcggatcgaggtggtgtggcgggtctaaccctccggcgccgctgactgctggtcggcgaggaacttggcgagttcggcctcgacgtcgaccgagtcggggtcgaactcgaaggtgccccgcggcccccgcacgatgatcgtggtgccgtcgtcgcctctcccgatcaggacggcgtcgtcgccctcggtggtgagcgcctcggtgaccttctccagcgtgagttc

SEQ ID NO: 36950 - DNA, 62 bp, Unknown
  Description of Unknown: RightRegion for integrase B10951 sequence
gaaaagattgaattcacgaaaaaagatcaaaatccccacattcttaatgtctctttttatta

SEQ ID NO: 36951 - DNA, 59 bp, Unknown
  Description of Unknown: RightRegion for integrase B10952 sequence
ttggagcagttccttatctctcccaatgaacgtaccgaggattataaccgcaggatcat

SEQ ID NO: 36952 - DNA, 260 bp, Unknown
  Description of Unknown: RightRegion for integrase B10953 sequence
accgcacttgttgaccgtatagaaataggccgtgatggtataacgatatattggaatttttagtttccattaagcgtctgtcgttttaatgactatttcttaacggaaacagtaacaaaattgttacattcaaccgcaaataaaggtaacattaagcaaataaaaagcagtgtggttaaatcagtttaataaattgttacatcgagccataaataagggtaacaattaagcaaataaaaaagcagggcggttaaccctgc

SEQ ID NO: 36953 - DNA, 260 bp, Unknown
  Description of Unknown: RightRegion for integrase B10954 sequence
tcaatctgcatcgataaaatcatgatcaccaacggcgaaatagagatgttctataacatctaaagcatattcagcacccaatttcaactacttcaagctatcccgatagacataagtagttgaaatccataaaccaaaaggagagaaacctatgtctattaacgcatcgtcggcattttcagtcgccatcgaatctgtcaggatgcggacagatttgaccgaaaaacagaaagaagagatcacatccctgctacataatg

SEQ ID NO: 36954 - DNA, 260 bp, Unknown
  Description of Unknown: RightRegion for integrase B10955 sequence
accttgatcgacgaattcgcgccgcacaacatcggcgctgagatgctggaggtcgaagcctgatggacaagtccttggaaactttcgtgccgttggtgttccgccgccgtggtgtccagcgcgtggccaccgacgaccgaaacgtccacgacgtcactctgctcgacgggctggcgcgcgccttctactggcagcaattgctggacaccggcgcgatgacgagtggatcggccatcgcgagggccgagaaattgcaccat

SEQ ID NO: 36955 - DNA, 260 bp, Unknown
  Description of Unknown: RightRegion for integrase B10956 sequence
ttcgaccttatccggcgcatcgacatcgatggtgatgatgtctccatctactggaacctttaatccaatttgaaacctattctgttgcaaaacactactcttttaatctctttgtcactatttgctttagcatagtgttactaaaggaaaaaaataaagcccccgggtatttctcccgagggctcatttttatgatcaaatctaacactttttacgataacttatacgatgaagaccttgctcatgtccctttcgaactg

SEQ ID NO: 36956 - DNA, 260 bp, Unknown
  Description of Unknown: RightRegion for integrase B10957 sequence
agtattattaaagaaatacatgtgaatgataaaaaagaaatcaccaatattattttttggtaatttcaatttagtaaataatattctcctgtaggtgcttattaattactaaataaaaagcacttgccattacagcaaatgctcaatctacattgaattaaaatgttttcacaaattcagcgtttccattatgatatttaagttgttttttcatgaagttatttaactttctttccgtgaaatcttattcatgccatgtt

SEQ ID NO: 36957 - DNA, 260 bp, Unknown
  Description of Unknown: RightRegion for integrase B10958 sequence
tcattgattaaccgtatagagatagacggagaaaacgtttatatctattggaactttgattagtgcatagacaaattgtcacttcaatgactattttataaggcaaataaaaaaaagacccccaaggaataaccaagggggtcaaagtgaggggaaaatgtatcgcaagcgatcaaatcgctgaacgaccttcgtttatgccgaatgcaacatagtgataataatacatcgggttatcgtccccgaatgcgttctgcaag

SEQ ID NO: 36958 - DNA, 260 bp, Unknown
  Description of Unknown: RightRegion for integrase B10959 sequence
tctatcgtggattatatagaagtggataaagacttgaattttatcccgcatttttttaactaaatatttttacctttaaggacacgccggacggagagtgcctaaaggtaaaaaacaaaaggaggcccgcaaacatggacacagcgcgaaaaattgaactattgattgatctttatatcaatggagagattgacaaggaagattatatcacgcttagaaaaagcattgaaggcggaaaaaattgtaagcaaaaggccggg

SEQ ID NO: 36959 - DNA, 136 bp, Unknown
  Description of Unknown: RightRegion for integrase B10960 sequence
tcggggcagaacacggctactatctcgtgttcggatattgcgtgttccgctccaccattttaatcgctggtcgaaccccaggcggcgagattatcgtcttgccttacggtttcgcgctggcggccaagttagagag

SEQ ID NO: 36960 - DNA, 260 bp, Unknown
  Description of Unknown: RightRegion for integrase B10961 sequence
gcctttcacacagccaaggtcttggcagagagaatgggtatgatcgaaatgcaggagaaataaaaaaagcccctcccttcggaggggttttgattcagaatacatcaggcatctacctcattgacaagcgcaatctcccgttcatagcaaccctgaaggaacgttgaccgtttcaccttgtacacatatcctttctgcgatatgatcgtcttgtctttgtcgatatacccagcgtttgccgtactcatgtacgttgtgga

SEQ ID NO: 36961 - DNA, 260 bp, Unknown
  Description of Unknown: RightRegion for integrase B10962 sequence
cgagtcaacattactccggggcgccctcgctcaaaggtccaggtaattatgcggagcctttgaggacagtcacgctcatgaccgactattgaggctccataggtaccgtgctttgtgaaaaagggtgacgacggaccgattgtggacacgttcaaatagcccaatgttctgcctctcctgtggctcagctctagacaagtaccggtggtgcggacactgcgaggcgttcgcggatgcgccagggtacgacaaaaagcccg

SEQ ID NO: 36962 - DNA, 260 bp, Unknown
  Description of Unknown: RightRegion for integrase B10963 sequence
tctatcatatcctccatcgaggttgagggagttacgataaagaaaatcaacttccgcgcatagcgcgtttttcttaggcgcatatggtggactaactacagtatcactaccgaaatggtgagttagtccaccattttcataataaaaagagggagggacataaatgtccttccctctctcttgttttagctcataactttccagatagcctgcttctgtgcatagctcaatccgtactcatccatcttgcggaagaactc

SEQ ID NO: 36963 - DNA, 62 bp, Unknown
  Description of Unknown: RightRegion for integrase B10964 sequence
caaatcattaaagcgatctatgttacaaaagatcgtaacgtggattatgtagattttttata

SEQ ID NO: 36964 - DNA, 260 bp, Unknown
  Description of Unknown: RightRegion for integrase B10965 sequence
attaaagatagaaatcaaacttattttacagaaagtcgtattaaaactattatttataactaaaattataaattaattattatataattgtaaattttatattaattattatataattgttataatttatatagaaattaataaaaattgttataatttaaacccttaaatgtataaaacggtttattatttttttctcaaattcgacttcatcactaataaattttttatattttgaccaatatatattataattgtta

SEQ ID NO: 36965 - DNA, 260 bp, Unknown
  Description of Unknown: RightRegion for integrase B10966 sequence
caccggccggagcgccgaggggacccggtgacgctcagcatccatggcacctgggagcagtagcccctccctaccgccgtgcggtgttgttgctggacgaggctgcagcacagtaggaactggtggatcctgtcggacccccgccctatcgtccgttccatgcccgacctcaccgccgacgagttcgccgtcctggacttcgaggaccagtggtggcggtcaccaggccgcaaggaagcggcaatccgggagcggttcgg

SEQ ID NO: 36966 - DNA, 260 bp, Unknown
  Description of Unknown: RightRegion for integrase B10967 sequence
agtatttcagaagtcggacaaattatcgtgattttcctagaaggaactgaagtagaattataagagactgtgactgagaggatgcagtctttttgtggttttagtggtataattacttaaggagtataaagcatgggtgaaaatttgaattctaatatagatcctcgaattatatttaaacaattacctccagctacaataatcaaaggttttgtagctggtgaggccaaatgtaattatgaaatttatctattggaatt

SEQ ID NO: 36967 - DNA, 260 bp, Unknown
  Description of Unknown: RightRegion for integrase B10968 sequence
ggtaatcgacggacgtttgatccaaacctgatcgacgtcgattggcataaaccgtttcggtaagtaagtaaagctccctttgcaaacggacatttggcgctatagtgattcgaacgattgttcgaatatgactggctaggggtgcatcatgacaaataacgacgtcttctccgtcgaagtcccgcgcgtggatacgcttgtggaccaggcgaatcagctcgacgtatcggcgtcgtcgttacttgtctcggttctggcgc

SEQ ID NO: 36968 - DNA, 260 bp, Unknown; identical to SEQ ID NO: 36051
  Description of Unknown: RightRegion for integrase B10969 sequence

SEQ ID NO: 36969 - DNA, 260 bp, Unknown
  Description of Unknown: RightRegion for integrase B10970 sequence
acctctctcatagatcgtgttcttctctttgaagatcacatagaaatcgtttggaatctgtaatacatctattagcacaagacgctttcacggactaaaggatatagtaaccgcaatgctttaagccatgcgggtttttggatttttatagcatacgttataatgggttcatctgtattaaatagacgcatgataatggcgcgagtctgaatttctcaaaacccgcgccattattccgtttgaccgttttattaaaccgt

SEQ ID NO: 36970 - DNA, 260 bp, Unknown
  Description of Unknown: RightRegion for integrase B10971 sequence
tccgtggcagtgcaggacgatcagatcacagagatccattttatcggtgacgtttgtgattgattgctttgccacctgacgaggcattttatcacaaataaaaattgaggccggattgctccgacctcttttataagttatagcttattttgttctgcattgtactgagcagtgctgatccccaagagcgcacccaacagcacgcagatcacgctgcaggtcttggccacctcatcggccagaggccactgccagatggc

SEQ ID NO: 36971 - DNA, 260 bp, Unknown
  Description of Unknown: RightRegion for integrase B10972 sequence
agaaatttaattaaggaaattcatatcattgatggtaggtatgtttttgatattaaattttagtgcttaacttatcatcaccagtaggttacgcttaattaggcactattttaaaaataaaaaaaagactaggtggcgttcctagtctatttataaagagagaaaaaagagtgcgtgtacacaattatattatctacaaaataatattttatatacaaaaaatgaggtgggattattttcccacctttttaatcttttca

SEQ ID NO: 36972 - DNA, 260 bp, Unknown
  Description of Unknown: RightRegion for integrase B10973 sequence
aagctaatcggtgaattcgcaccaagagagatcggcgcggaactgatggaggtcgaggcctgatgaacagctcgctggaaactttcgtgcccctgcacttcaagcggaagaagggaaagctgctggtcgacgggagggaatctgcccacgacgtccggataattgaggccgttgcccgggccatgtactggcacgacctgctcgactccggtacgttcaagagcgtggtcgagatcgcccgtgcggaaggattgatgcca

SEQ ID NO: 36973 - DNA, 260 bp, Unknown
  Description of Unknown: RightRegion for integrase B10974 sequence
gttttactcgaggtacgagtggcggcaggtggcggcgctgtagccgtgcctcgtaccgtttgaccattatcagtagagcttctcttgcggtcagaggctgggaagggtgatccatgggaggcgcaagctgtggcaagcagcatacacccctggggcgtgcgggatacagattaggcgccccttaaagaaatgttcagtgttaacgcccgttgacacccctgagcgattggcggattagtcgacgatttaataatttagcc

SEQ ID NO: 36974 - DNA, 260 bp, Unknown
  Description of Unknown: RightRegion for integrase B10975 sequence
gttgccataaacaaacagcaagatttaccccctatggggtataatacaggggaaaagcgttaaaattgacacttttcgggtataaaaaatgccctccccgaagggagggtttttgtgtttttggggaatttcagcaaatagtttttcggaatattaccaaacagttttgacgaaccgcctgtcccttagtccacccaagaggacggtctgcggctgttcggggtcttgcgcctgatgcgggagaagcatcttcctcagag

SEQ ID NO: 36975 - DNA, 260 bp, Unknown
  Description of Unknown: RightRegion for integrase B10976 sequence
acccccggccgcgggcctgggcggatcagcgtcgagccccgcggcacgctcctcggcgagtagccggcgggcctcgcggtcgagcaccgcctgagcctcggcgcgcgcgtcgtcgtcgaggcgccagcgaaccgggctcacagcggcgtcaccttgaccgtctcgcgcacttcgacctcgacgcgcacaggcttccacgatcgcttcggcaccgcggcgtagacggccgtctcgttgctcacggtggcggcgtacttgcg

SEQ ID NO: 36976 - DNA, 260 bp, Unknown
  Description of Unknown: RightRegion for integrase B10977 sequence
ggtaagggcgtgaggttctcccccgaacaagtgcgcattgagccgaaaggaaaccagccatgagccgcaagagcaagggcctccaagtggacaacctggacggaatggtggtcctccagtgccccaacggacacacggtggcaaccgtccgaaagtcgcttggccgttaccacatgacggccggggactttgagggtgaaaaccccctggaccacccactggcggtcacttgccgctcctgtgtggccgcgggtcgccgt

SEQ ID NO: 36977 - DNA, 260 bp, Unknown
  Description of Unknown: RightRegion for integrase B10978 sequence
gccctgatcggtgaattcgccccgagagggatcggcgcagaactggtggaggtcgaggcctgatggacgacacactggaaaccttcgtgccactgacgtttcgccgccggggcgcgcggcgcgtggccgccgacgaccgccacgttcacgatgtgacgctgctggagggggtggcacgcggtttctactggcagcacctcgtggacaccggtgtaatgaagagtggatcagacattgcccgggccgaaggactgcacccc

SEQ ID NO: 36978 - DNA, 260 bp, Unknown
  Description of Unknown: RightRegion for integrase B10979 sequence
agagccctcattgaccacatagagattgatggtgaggacatccacattcattggaacttttgaattattagcccattcacatggtcatttcaatgactctgtgtttaggcaataaaatagaggcaggagagaaacctgcctcttttcctatctgtcattgatgatgtcatacacatcacagtccagagcctctgccaattgcaacactgtgatgacctgtgccttgttgatgtccctgttgccctgctcaaacatttgga

SEQ ID NO: 36979 - DNA, 260 bp, Unknown
  Description of Unknown: RightRegion for integrase B10980 sequence
ctcatcaaagagttcgcagcgaagggcattggtgcggaactggtggaaatggagcccgcatgaacgctgacctcgaatcctttgtgcccctcacttattcccgacgcggcgtacagcggctggccaccaccagtgccgtggcgcacgacacgacgtttttggtggggctgagtcgtgcgttttattggaagagcctgctcgacaccggtgtcatgaaaagtggctccgagatcgccaagaatgaagaccttcaccactca

SEQ ID NO: 36980 - DNA, 260 bp, Unknown
  Description of Unknown: RightRegion for integrase B10981 sequence
gccttgatcggcgagttcgcgcccaggagcatcggcgccgagctgctggaggtcgaggcatgaaggacgggacgctcgagaccttcgtgccgctgaccctgcggcggcgcggcgtgcgccggctggttcagcaccaggccgaggaccgggacgcgcacgacagcacgctcatcgaagggatggcacgggccttccactggcaacggctgctggacagcggcgcgatgcccagcggctcggccatcgcgcgcgccgaaggg

SEQ ID NO: 36981 - DNA, 260 bp, Unknown
  Description of Unknown: RightRegion for integrase B10982 sequence
agccttataaaaaagattgtgctaaatggcgatgccgttgaaatatactggcgctttgagtaaagccaaatattataccataaagtgtgttaaaagtaattgccatgattttgccgtggttttgccatgaaattgcaaggcaagtaatgcaaatagtaattacttttgtatacttaggtatatacttacgtatatttgaaatgaattatacttttaaggccacaaaagtgtaattcattttatttttcagtgtattgtag

SEQ ID NO: 36982 - DNA, 87 bp, Unknown
  Description of Unknown: RightRegion for integrase B10983 sequence
ataaaatatgtaaaacttaaaaataggcattctattaaaataagcgatatagaattttattaacttatgtacggaagtatagacact

SEQ ID NO: 36983 - DNA, 86 bp, Unknown
  Description of Unknown: RightRegion for integrase B10984 sequence
atagagtatgtaaagcttaagaacagacattccattgaaataaaagatatagaattttattgatataagtacggaagtatagacac

SEQ ID NO: 36984 - DNA, 95 bp, Unknown
  Description of Unknown: RightRegion for integrase B10985 sequence
atagagtatgtaaagcttaaaaacaggcactccattgaaataaatgatatagaattttattaatatatgtacggaagtatagacacctgattaat

SEQ ID NO: 36985 - DNA, 260 bp, Unknown
  Description of Unknown: RightRegion for integrase B10986 sequence
gatactttaatagatagaatcatagttaaagatgataatgtagatattcatttttctttttagtacacttaaacatctattaaaatagtagtttaagtcatacaaaaaacaaagacgcccctgtgaaaagggcgtcctctttacaaaacactattctgctttttaaaatacttcaacaaatacttggcgtccactacatcgtaattatcatctttatgatctggttcgccttctacgctatcttcatggaaatcatagtc

SEQ ID NO: 36986 - DNA, 260 bp, Unknown
  Description of Unknown: RightRegion for integrase B10987 sequence
accgcccttatcgacaagatatacatagacggcgacgacgtttcaattcattggaagtattgacgggttttccgtaaagctcatcttaatcaccttaacggaataaccttttcggacgattttagcgtcgctggaatgattaaggcacagtttaccgctcggacaataaaacacgctcaaatgggcgattttcgaccttaaacgggaagataatactctatccgagcaataaaaaagagggcggctttccgccgcccccg

SEQ ID NO: 36987 - DNA, 260 bp, Unknown
  Description of Unknown: RightRegion for integrase B10988 sequence
actataattgacaagataataattgtcaatggagatattgagatacaattaaagaatttttagcacatactacacaccatgccgatgataatgggcgagataaagaggtttttgcgggatgatgggatgattaaggtcagcaggacattgcgggaaaatggctggaagataaaaaaagcggcagaaaagataagctatgaaaaaggcagaaatgcaaagataagtgagattgctgctgcaacggagataacggaggagga

SEQ ID NO: 36988 - DNA, 260 bp, Unknown
  Description of Unknown: RightRegion for integrase B10989 sequence
aagtggcctcaactacgatctcttctggaggagtggggggaggatccacaaagcctggaataaggaacttgtagatcgtgtaatggcaggcctcgtaggtagcctgctcgtacggatcaagattccgcatttccattgcccagcggcgatcttcgtattcatcgtcccatccaccttcttcgtcttgcagctcaatgggctgtatgccgttgcgcatgaacatctcaatggctgtcaacgcgacgttcacccggtcctgc

SEQ ID NO: 36989 - DNA, 260 bp, Unknown
  Description of Unknown: RightRegion for integrase B10990 sequence
tccatgattgagtccatcacgctttttcccggccatgatttggagtttcattggaagttttaatttttacccacaatcggtgacgtggtttcaacctcgttattagttgtgggtatttttaaaatatttcttctatattatatacgtaagtatatcgcactgactacttacgtatattgcaataaaaaaagaggcaagccgaagcctgcctctttggaggggagtatatgagaaaagcaagaaaaccgaaaacctatcag

SEQ ID NO: 36990 - DNA, 260 bp, Unknown
  Description of Unknown: RightRegion for integrase B10991 sequence
cgggccatcataaaggaaatagagatagagggcctaaaggttacgggcgttaaatttttttgataattttcctggttttacatacctatatccacagaaatatatctgtaaaaccggaaaaagaaaagccgaaaaaaccgcgtaaaatcgccgttttcggcacatcttgacaaaattataaaaatgtgtacagcaaaaggagcccgcgggggctccttttcgtttagtcgataagccaggatgttgatacgctgatggta

SEQ ID NO: 36991 - DNA, 260 bp, Unknown
  Description of Unknown: RightRegion for integrase B10992 sequence
gagttgcatcacaaaaaactgcgcaccactgaaacggaattggaagcggaggccatggcatgagcgaacttcaaatccgagccaccggcaccacagaagtaatccagtccagcgacggccggatcacgctgtcggtaccgattcagatcaagcgccgcagcgggcgcaaacaaatgactctgcccaacgggcaatcagggcagccgggcaaactgttgcgaccttgggatgtggcggccacaccgctgcaactggcgctg

SEQ ID NO: 36992 - DNA, 260 bp, Unknown
  Description of Unknown: RightRegion for integrase B10993 sequence
gtgacgctccataccgtcaagggtgggagcaccaatccgtttatgcgaatcgaagtcgcataacgctcgcccccgaactacagactcccctacaaaaccccccgtgtggattttcccacgggggttttgctattctcgcccgaatggattacaagtaccgtcaactcatcgagagctacatacggattgcccagggcgaaaacgttacatacgaactagtccacgaactaagcgggctaaccctcgaagaagcccgagta

SEQ ID NO: 36993 - DNA, 260 bp, Unknown
  Description of Unknown: RightRegion for integrase B10994 sequence
ttaaggattattgataaaatttatattgagaacggcgaaattaaagaggttacttttttgtaacctcttttgatgtataatctcttgcatttctagtattttatcgttccaaaattaatcgttcgtttcaactggtgcttcaactgggcaacaataattaacgaacattacaattattccaattaaaacctgcttttacaccttctttataaatttcaatgaattttttcttaaaaaatactctttcgacaatatttaat

SEQ ID NO: 36994 - DNA, 62 bp, Unknown
  Description of Unknown: RightRegion for integrase B10995 sequence
ttaaggattattgataaaatttatattgagaacggcgaaattaaagaggttacttttttgta

SEQ ID NO: 36995 - DNA, 260 bp, Unknown; identical to SEQ ID NO: 36746
  Description of Unknown: RightRegion for integrase B10996 sequence

SEQ ID NO: 36996 - DNA, 260 bp, Unknown
  Description of Unknown: RightRegion for integrase B10997 sequence
acccgcaaaggggccaagttcaaccccgacgacatcgacgtccaatggaggatagacgcatgacgctgcgtcaacatgcttgacaacctgtgccatttcggcgctacagttgttagataagaaccccgcacctgagggcatcaggccggggcacggtccaactatctaggagttagacatgtcaaagattacccatgccgtcagggccgccgcaatcgcggtcgcctcgttggcgttgactctcacagtcgcggtcgcgg

SEQ ID NO: 36997 - DNA, 260 bp, Unknown; identical to SEQ ID NO: 36996
  Description of Unknown: RightRegion for integrase B10998 sequence

SEQ ID NO: 36998 - DNA, 260 bp, Unknown
  Description of Unknown: RightRegion for integrase B10999 sequence
tctagtataatagataatgttgaaatacttgattatgacaatataaaaataaacgtgtattaacttgaatagtcctgaagggctatgttagttgatacactcattaggagtgtgttaaaaaaatggaaataccaaagaaagtaagagaagaactagacaaaatatacgaagcttatgataaccaagcatatataattgattataaaggacaatacctaccaaagaaaagcgacgtattcacaataagacactatcatcat

SEQ ID NO: 36999 - DNA, 260 bp, Unknown
  Description of Unknown: RightRegion for integrase B11000 sequence
gacacccaggtcatcatgtcagacatttacattccagacgaaatactggaactgctcagttagtcatcttcccgaaccggcccttgcaaagacggcactgaccctgctccacatcctcacgtttcccattcgggttatagagggcgaggggcatcacttcgcggcagccgcacaaacgcagaccagcctcggttaactgctgctcagttaccggcattcttcaacacatcccatcccagattcgggttagcgtccttcca

SEQ ID NO: 37000 - DNA, 62 bp, Unknown
  Description of Unknown: RightRegion for integrase B11001 sequence
ttaaaaataattgataaaatttatattaaagaaggaaaaataaaagaagttacttttttgta

SEQ ID NO: 37001 - DNA, 260 bp, Unknown
  Description of Unknown: RightRegion for integrase B11002 sequence
aaactaaaaaggtatataagagttattaaggtttaccctgacaagattgacatagatttttaagttttcggtaaatagcctcacccatttgtcataaatgcaaactataaataaagcaggtatatgctagtagataattttgacaaagtgaaatatttgttatattatgggaaggaaattgcaaggaagttcacaaggcaatatataaatttagtaaggagcccccatgagacactaccccgaaaacagcacaaggctat

SEQ ID NO: 37002 - DNA, 260 bp, Unknown
  Description of Unknown: RightRegion for integrase B11003 sequence
tctatgattgaacgcatcacacttcttccggatcatgatttggaaatccagtggaagttttaaaatatacgtaagtagtttttgcagattacttacgtatataaaatttcacttgcttattacttgcctgtaacttgctatactaaagaaatcactgtttttctttaatacagtgattttatccacacttctgtggcatggtttcaaccttgttaatacattgtggataattttgtggagtttcttctatatataataaa

SEQ ID NO: 37003 - DNA, 260 bp, Unknown
  Description of Unknown: RightRegion for integrase B11004 sequence
tctttgattgataagattgagatagatggagaagatatcgctatctattgggcgtttgtttaattatgccgttcctttgtctatcttgcttttgattttaaccataggaaaaataggcaaagtatattatctattatttattatttcatacacatcgcactccaaagcctcagccaactgcagaactgtgatgacctgtgccttgttgatgtctctatatcccatctcaaatgcttggatatttctgacagggactccac

SEQ ID NO: 37004 - DNA, 260 bp, Unknown; identical to SEQ ID NO: 35791
  Description of Unknown: RightRegion for integrase B11005 sequence

SEQ ID NO: 37005 - DNA, 260 bp, Unknown
  Description of Unknown: RightRegion for integrase B11006 sequence
actataatatcaaaaataattatagtcaatggaaatattgaaatacagttaaaaaaattttagcataaactatatgccataggaactgcattatgtaagtgctaataaatgccgcacgtatcatgtcaataaataacaggagggtaacgatgatctcacagggaattagtcataccgcatatgatgtaatgagagaatacatgattataggagcagaactagacgaactgccagaaaatcagcgtataaaatagttcgca

SEQ ID NO: 37006 - DNA, 60 bp, Unknown
  Description of Unknown: RightRegion for integrase B11007 sequence
acggagaccagggaaaagctgcggctgctgttcagccagtgggtggagcaggtggtggtg

SEQ ID NO: 37007 - DNA, 260 bp, Unknown
  Description of Unknown: RightRegion for integrase B11008 sequence
actataatatcaaaaataattatagtcaatggaaatattgaaatacagttgaagaaattttagcacaaactatatgccataggaactgcattatgtaagtgctaataagtgccgcacgtatcatgtcaataaataacaggagggtaacgatgatctcacagggaattagtcataccgcatatgatgtaatgagagaatacatgattataggagcagaactggacggaaaatatcagataccgatgttagatagatacgca

SEQ ID NO: 37008 - DNA, 260 bp, Unknown
  Description of Unknown: RightRegion for integrase B11009 sequence
ccaacatataggaattattctgaaaatcaacaacaaaatattggtgtgctaaaacttcattaaccggatggttagtgaaaaaattaccacggtcagtagaaaaccaaccgtggcaaaatgacagaccggaaaggagccgaaccgatctgccaaactatatgaaaattttatatgttagttcatgcctataacatactattataggttctccacatagaacccgaccgtatcgatgcgctgctggtttccgtataggatca

SEQ ID NO: 37009 - DNA, 260 bp, Unknown
  Description of Unknown: RightRegion for integrase B11010 sequence
ttttctataattgataaaatttatatagaaaatcataaagttacaaaaatcgaatttgcttaatccattgtaaacagtacattatagctctgtgtaatttcaatctataaccacatgggcatgggttgaaattacacagaattagcactcgcttaaaatgtttttcatcttttaaacttaatgtaattcttcatccaaatattaatcaaaacatccaatttctgactttgttttaatatttcatcataactataatcgtg

SEQ ID NO: 37010 - DNA, 260 bp, Unknown
  Description of Unknown: RightRegion for integrase B11011 sequence
actataattgataaggtaattgtaggcaaggacgatatagaaattcagctaaaaaacttttagcacttacataatgcagttcctatggcgttaaggtggtgctatacagcatatacactacattctttttgacacatgacgcattatgtgtcttttttattgctattttttaggctatatgttatgttgattgtgtacttaggaggtatattgatgattgatatatctaagctgataaaggctgaatatgagtacataag

SEQ ID NO: 37011 - DNA, 59 bp, Unknown
  Description of Unknown: RightRegion for integrase B11012 sequence
gtctcacgggaacccggaacacaaatgttcaccgccaggttctaccgcccagacgaaat

SEQ ID NO: 37012 - DNA, 260 bp, Unknown
  Description of Unknown: RightRegion for integrase B11013 sequence
actataatagataggattgttatagtcaatggaaatattgaaatacagttaaagaatttttagcagaaacttaatgccatgggcatggcatataggaagtgctaatgccgcatttatcacgtttttataattgcataattttaataatgtcgcttatgtatcatatatatgtctattatatgtcgctatgagcgtctttttttatgccaaaatataatcagaaagagaggtagtgcaaatgttttctgatgaagttagag

SEQ ID NO: 37013 - DNA, 260 bp, Unknown
  Description of Unknown: RightRegion for integrase B11014 sequence
actataattgataaagtgattgtaggcaaggatgatatagaaattcaattaaaaaacttttagcacctacataatgcagttcctatggcattgaggtggtgctataccgcatatacactacattctttttaacacatgacgcattatgcgtcttttttattgctattttttaggctatatgttatgttgattgtgtacttaggaggtatattgatgattgatatatctaagctgataaaggctgaatatgagtacataag

SEQ ID NO: 37014 - DNA, 260 bp, Unknown
  Description of Unknown: RightRegion for integrase B11015 sequence
agtataattgaaaaaatcataattagcaatggaaatattgagataaaattgaaagatttttagcactactataatgctatccaatggtatatatttactgctaatataggtatattaatttagcagtaaaataacgccatacccatggcatggggttagtgctaatgtgcatatttactacacttttgagtcattatagtggcaattattaggcgctattaatggctctttttgttttatgataattacaaagggaggaa

SEQ ID NO: 37015 - DNA, 260 bp, Unknown
  Description of Unknown: RightRegion for integrase B11016 sequence
aaatacttaaaggctattaaagtcaataaagacggtacttttcagcagcctatatttttttaggctgttgttgtactaacatcatagctccatttggagctatgttattagtacaacaattagtaaaagtaataaaagccctatttctagggcttttttgtttattttatgtatcttacaaaaatctcacagccgtaatttgttctgctgccgtcatctagtttattaccgccatatatgtcacagttaatattatcacg

SEQ ID NO: 37016 - DNA, 260 bp, Unknown
  Description of Unknown: RightRegion for integrase B11017 sequence
agtataattgataagattgttatagtcaatggaaatattgaaatacagttaaagaatttttagcacttactatatgctgtgccaatagcattaagttagtgctaatgccgtgtttatcgtactttttacaattaaataaaatcaaactgtcgtttttgtgtcgttaaactgtcgtttttctgtcgctttaagcggctttttttatgtgaaaataaaattacaaaaaggagagtgattgaagtgtacgacgaagatttaag

SEQ ID NO: 37017 - DNA, 260 bp, Unknown
  Description of Unknown: RightRegion for integrase B11018 sequence
cacgctgtaaccatagaacgcaagaagggttggcgtggaaaatggatggtccaatccgcctagaagtctctactggtagagtccagcaaaccgcttcatcgtgacgctgccggtgttgccgtgatagacgagcttccgattgggatcgcaggcgatctggccagcggtgctaatgtctccgcccgagaatggatcctcataggtgaccgacatatcgctgaggtccaggatgcagaaggatcctgatgatgcctgaagga

SEQ ID NO: 37018 - DNA, 260 bp, Unknown; identical to SEQ ID NO: 35560
  Description of Unknown: RightRegion for integrase B11019 sequence

SEQ ID NO: 37019 - DNA, 260 bp, Unknown; identical to SEQ ID NO: 36198
  Description of Unknown: RightRegion for integrase B11020 sequence

SEQ ID NO: 37020 - DNA, 87 bp, Unknown
  Description of Unknown: RightRegion for integrase B11021 sequence
ttaaaatcactaattaataaaatttatattgacggtgaacaagttactattgaatggctctagtagcttgtttatttagattgttta

SEQ ID NO: 37021 - DNA, 260 bp, Unknown
  Description of Unknown: RightRegion for integrase B11022 sequence
gaacgggtggtgctggaactgcagccagccagcgccaaccaatctgaggaggtggcggcatgagcgatctgcgcatccaaaagaccggcgagcctgacatcatcgaaaccagtgatggccgattgacggtgtcggtgccgatccagttcaagcgtcgcagcggccgaaaacttgtcacgcttcccaatggacagacgagccgagcaaggccctgggacacagcggccacacctttgcagttggcactggcccgagggcac

SEQ ID NO: 37022 - DNA, 260 bp, Unknown
  Description of Unknown: RightRegion for integrase B11023 sequence
cggggtataataaaagaaatccgcttcgggttagacaagcggattgaggttgattttctttagtattaacaggatgccacgtacaggggctatataaatagtaataaaccccgcaggtgctttcctgcggggtctttgttaccactcatcgtattccgtttcgctgaactctccgtcctcatcctcgtaactcatgccgctttgccgctcctttatactgccgtatgtatatccgttgtcgtggctgagtacgaacaggg

SEQ ID NO: 37023 - DNA, 190 bp, Unknown
  Description of Unknown: RightRegion for integrase B11024 sequence
ggccgagatgacaccatcaagttcgtttactactccggtatcgaaaacacagtaaaaatataaaaacatcgataaaatctacataatttgtgggtggctaataaaaatgcgagtggctaataaaattcggagtggctaatttgtattaaaatcgtcgtttcaagccatctagaatggtcaggattgatac

SEQ ID NO: 37024 - DNA, 260 bp, Unknown
  Description of Unknown: RightRegion for integrase B11025 sequence
cggggtatcattaaagaaatccgctttggtttagacaagcggattgaggttgattttctttagtattaacgggatgccacgtaccggggctatacagatagtaataaaccccgcaggtgctttcctgcggggtctttgttaccactcatcgtattccgtttcgctgaactctccgtcctcatcctcgtaactcatgccgctttgtcgctcctttatactgccgtatgtatatccgttgtcgtggctgagtacgaacaggg

SEQ ID NO: 37025 - DNA, 260 bp, Unknown
  Description of Unknown: RightRegion for integrase B11026 sequence
gagtgtgttgaaaaggttgttatcgcgggagatgacatagacatacattttagcatatattaataggtactttctcgtgttccaaccatcatcccaacagcggtaggaagtggagaaaaggaagaaaagaccaagattctattatatgattaatatgataaagacaggagctgaaaatataaatatatagattaagataaaaagattttgaaaataattgaaatctcttatttttttacttgactagtggacaccactat

SEQ ID NO: 37026 - DNA, 260 bp, Unknown
  Description of Unknown: RightRegion for integrase B11027 sequence
gagtgtgttgaaaaggtagttatcacaggagatgacatagacatacattttagcatatattaataggtactttctcgtgttccaaccatcatcccaacagcggtaggaagtggagaaaaggaagaaaagaccaagattctattatatgattaatatgataaagacaggagctgaaaatataaatatatagattaagagaaaaagattttgaaaataattgaaatcttttatttttttacttgacaagtggacaccactat

SEQ ID NO: 37027 - DNA, 260 bp, Unknown
  Description of Unknown: RightRegion for integrase B11028 sequence
gagcgcctggtgctggaacttcagccagcgggcgcggcccagcccgaggaggcattggcatgagcgaaatccgcatccagaagacgggcgagcccgacgtcatcgctgccagcgatgggcggctgaccttgtcgataccgatccagatcaaacggcgcagcgggcgcaagctggtcacgctgccgatcgacccggtgaccggcgaaccagccaaggccagaccttgggacaccgccaccacgccgttgcaactggcgctg

SEQ ID NO: 37028 - DNA, 59 bp, Unknown
  Description of Unknown: RightRegion for integrase B11029 sequence
gacttagtgccgataactgagtatgatgagagcaaagtcaaaacattcttggattatgc

SEQ ID NO: 37029 - DNA, 260 bp, Unknown
  Description of Unknown: RightRegion for integrase B11030 sequence
gaacgtctggtactggagctgcgacccacgcaagtggatgccaccgaggaggcaatggcatgagccagatacgcatcgcccagatcggcacacccgatgttatttcttccagcgacggtcgcctgacactgaccatccccatccagatcaaacgccgcagcgggcgcaaactcgtcacgctaccgaatggcgagacagcccagccccgaccatgggatgtcgctgccacgccgctgcaactagcactggccagaggctat

SEQ ID NO: 37030 - DNA, 260 bp, Unknown
  Description of Unknown: RightRegion for integrase B11031 sequence
agggcgcgatctgggcagcgccggttcgacgaggggacggtcgagctgcgtcggaagggctagacccggcggaaccgcgagctggaggatagatggggatgcgggccgtgaagcgttccggcatgtcggttgtgatctcgcccgtgagcacgaggtaggcgccgtctgcgcggatgccggtgatctcgccgacgatcatgcccacctcgtcttcgagccagatctcctgccctgtgaggtcgctcatcggcgtcgtacag

SEQ ID NO: 37031 - DNA, 260 bp, Unknown
  Description of Unknown: RightRegion for integrase B11032 sequence
gagactgaccatgccaccatccaccccgacggaacaatcgctatcgcgttcaacgacggatgagtctgtagttcggctgcaccccttggccccaggtgcatatgacctcaggcttctctatcttcgcagtcaatctgccttaacgcccatcatcatgtatgccatccaggtctaccgtcgataccctcctcacaattggaaccagtgacatttctgcagggttgccaaacggagaaagtatgagtatgtttataaacatg

SEQ ID NO: 37032 - DNA, 260 bp, Unknown
  Description of Unknown: RightRegion for integrase B11033 sequence
ctggcgagcctggcgcgagatctcgcgatgccgacggccgaagcgccgagggcggcagcatgaccggcgctgcgcagatgctgaccgtgcgggtgccgctggcggttcggaagcagcggggcgggcggaagctgatgatcgcgcctgccagcaacacgaagcggggcagcttggcggcggacaccacattggtgaaggctgtggcccgggcgtttcgatggcgacggatgatggaggcgggtcgcttcggcacgatcgac

SEQ ID NO: 37033 - DNA, 260 bp, Unknown
  Description of Unknown: RightRegion for integrase B11034 sequence
gctcttgttgcaaggatagacctattcaatgatactgtaaaaataacatggaaattctcatgactatttttttatagactgtttagccttgattttatccatgggtaaacagtctataaaaaatagcctattctcatgaaacgtattatgagaacatattagcatccaagcattttgttcacaagtgcttggatttctttgtagtcatatcctgccatctcaagcattttctttcttgtgggatttgttttggctgttcc

SEQ ID NO: 37034 - DNA, 260 bp, Unknown
  Description of Unknown: RightRegion for integrase B11035 sequence
agaggtattatatcccgtatcgagtttgattcagacaggtctataaaggttatatttttgtgatgtttgacccgtactaaatagccgtgtccgtcagggcgcagttagttagtacgggttttttgcgcccttttcggcacttccatatcattctctccccgcctatctgatgccagaatataggcatgttcattcaagcaaatctcaaccctcagcacaagcgcacggatgattgtgttgttagggcaatagcaaccgcc

SEQ ID NO: 37035 - DNA, 260 bp, Unknown
  Description of Unknown: RightRegion for integrase B11036 sequence
caatcccttataaaagaaattaaatttgatgaagatagaaattttacaattatttttaggtagtaactagacaatacctgttggatgtgtcctattaccacctattaattaaaataaaaaaagactaggcaaaaaacctagtcttgtatcaggaagtagtagttgtgaagaaagagttgtatcttataatgagagagtggcaggaaacctgcattaatagtattccttaattaattaaattaatgcacaaaaaaaagaga

SEQ ID NO: 37036 - DNA, 260 bp, Unknown
  Description of Unknown: RightRegion for integrase B11037 sequence
agatcgatcgtaagggaaatcacgattagcaaagatagaatattgactgttgaatacttgtgaaaaagagaatttcgcctattttgtgcctatccatcaggatagtatcaaaataggcggaattttattttttgctctttagtttttccaaagtcgccgtgtacagcctgggattgtataccgacaacgcggacataagatcatcgaagaccaacaggagaaacgacgttttgacgccatcacagacggagagaaactcg

SEQ ID NO: 37037 - DNA, 260 bp, Unknown
  Description of Unknown: RightRegion for integrase B11038 sequence
ctggccagcctggcgcgggacctcgcggcgccaccggccgaagcagcgagggccgcagcatgacgggcgctgcgcagatgctgaccgtgcgggttccgctggcaatccggaagcagcggggcgggcggaagctgatgatcgcgcctgccagcaccacgaaccgggggtcctcggctggggacacgacgttggtgaaggcggtggcccgggcgttccggtggcggcggatgatggagaccgggcgcttcgccacgatcaac

SEQ ID NO: 37038 - DNA, 260 bp, Unknown
  Description of Unknown: RightRegion for integrase B11039 sequence
ggggcgcacggcaggcgcgcgttcgacccggagtcggtgcgggtcgactggcgcgccgactagggcagcgcggtatctcggtcagcggtctcggccttgcgaccaggcgtggacggtggtcggcgatcggccgatcgcggccgccacctggcgaatggagccgtggcggagcgccttctggacagcggccttccgggcttccttgacggactgctcgtcggcgtcacacttcgcgagcgcggcctgcagcgcggcgacga

SEQ ID NO: 37039 - DNA, 260 bp, Unknown
  Description of Unknown: RightRegion for integrase B11040 sequence
agaaatttaataaagaaaataaatatagatgaggattttaatatgtctattgattttttatgattatgtatttactaactatcatacaccagttggttattactagttaaaacatactaaaaaagactaggttttattcctagtctatactttttgttttatatgctcctgtgcctttaataattcaattctagaaggttttaaaagaattatagtataatttatcgcttttaacttaaaatgctttaaaacggatttta

SEQ ID NO: 37040 - DNA, 260 bp, Unknown
  Description of Unknown: RightRegion for integrase B11041 sequence
aaggggatgccgaaattattacgtgaatcaataactcaaacgcaatatcgtgaggcagcatgaataaagatattttagaaagtgaaatgactcatattccgatgacgtttcgtgcgcgagcggggaagacagtaatagtcctaccagacggaagtcgcggtgttgtccgaagaggtgcaacgatagataactcaatggtgaaactgttagtacgtggctttcgttggcaacgtatgctttacgaaggaaaattcacttcg

SEQ ID NO: 37041 - DNA, 260 bp, Unknown
  Description of Unknown: RightRegion for integrase B11042 sequence
tggcggtcggtactgactgagatccggtttcacagcgaccggactattgatttgtacttttgaccggtaccaacagaatgctgccgtcctgtgctgttttgttggtactggtcattttttcgcgtttcttccaataaaaaaaagaggccaggatctaagcctgacctcttgaaaaacgtgtgcatgcagtgacggtttttctttatttcatttctacaccagagctgtcataaatatgataaccctcgtgcttgtcgcgc

SEQ ID NO: 37042 - DNA, 260 bp, Unknown
  Description of Unknown: RightRegion for integrase B11043 sequence
tccatcattaaggaaataagatttgataaagacagaaactatgatataatttttttagcttagtcctgtactaagtgaatgcctccatcttgaaaatgtatgatactacaggacaaaaggactggggttttatcctcagtccttaagtctgcgtattatattctcatacattcggggattcactatctgtaaatcatccatcatatcagcgattacaggaattatatccgatacggatcgttcacttatcatttgcgcaa

SEQ ID NO: 37043 - DNA, 260 bp, Unknown
  Description of Unknown: RightRegion for integrase B11044 sequence
gtattcgatacggacagaaatctttctgttttatttttagagcattatgggggttctaagtaaaggtagccgttccgatacagcctattagaacccccacgcctactattatccttattctgaacactgtaagtgtcctttaaatcactcagcttccggttcttcaacctcttccggttcgggtgtcggaatgcagctttaagtaactaaacagtgtgggattctttccaccttttctttgcgtctttcaccgtctgcac

SEQ ID NO: 37044 - DNA, 260 bp, Unknown
  Description of Unknown: RightRegion for integrase B11045 sequence
cggtcggtaataaaagaaatccgcatggatgccggaaagaatcttgatattatttttttgtgatttcatggtattaaacaacgctttccattcggatatagtctgttagtagcacttcataacaaattgaattcgaatgaaaatatttgtgttttgtcgttaaaaagttattgacattcaataacattctgctataatagtatatgtaaggaacagacaacagcacaccgaagggggtaataaaaatgacaaacagacag

SEQ ID NO: 37045 - DNA, 260 bp, Unknown
  Description of Unknown: RightRegion for integrase B11046 sequence
tccatcattaaggaaataagatttgataaagacagaaactatgatataatttttttagcttagtcctgtactaagtgaacacctccatcttgaaagagtatgatactacaggacaaaaggactggggttttatcctcagtccttaagtctgcgtattatattctcatacattcggggattcactatctgtaaatcatccatcatatcagcgattacaggaattatatccgatacggatcgttcacttatcatttgcgcaa

SEQ ID NO: 37046 - DNA, 260 bp, Unknown
  Description of Unknown: RightRegion for integrase B11047 sequence
gaaaagctgataaaatcaataaccattaacgataaatccgtctctattgagtggcttttttaattgcgaagtctttacgtattcattactggctactgtgggagcaggaaacgagtacgtaaacagaaaatcccccgcagcggtgcatccgctgaagggggattttgattattgaccaatatcgcttctctcgatccgccagatggcttgcccgcttgtgaacggattggagaaaatgaactcgtagtaatcagaatcag

SEQ ID NO: 37047 - DNA, 260 bp, Unknown
  Description of Unknown: RightRegion for integrase B11048 sequence
ctggaaaccatgaagcccaaaacgatgggcgcagagttactggaaatggagatgcccgcatgagcgacatgaccgtgagcgacagtacgagcggcgacacctttcggatcaccacgcgcaccccattcaagctcaagcgccgaccaggcatcaaaacggttgtgatgacacccgaaaagaccgaaggtcacgtaaacggcgagtgcatggacaagagcagccaaattgcactgttccagggactcgctcgggcccactac

SEQ ID NO: 37048 - DNA, 167 bp, Unknown
  Description of Unknown: RightRegion for integrase B11049 sequence
agatcagtcattaaagaaatccagattgacgatcacaagaatttaaaggtcatttttttatgacctttttgtagtagtaactaatagtaacctgttctttatttggatagatccttatttttactgcccggtttatctttctcaccctgactctctatatactgatg

SEQ ID NO: 37049 - DNA, 260 bp, Unknown; identical to SEQ ID NO: 36108
  Description of Unknown: RightRegion for integrase B11050 sequence

SEQ ID NO: 37050 - DNA, 260 bp, Unknown
  Description of Unknown: RightRegion for integrase B11051 sequence
cgaaatctcatacaagaaattcaaattgataatagttataatattactattatttttttataattttttctttgactaacgcactatcgccaataggcacgtttatattagtacaagtttttatagcataaaaaaagataggcaaaaagcctaccttttaaagagtgttttagaagaagaaagagtattatggcgtgtacacattaatagtattctttttaactctttttttatacattttaatgcactttttcccaagc

SEQ ID NO: 37051 - DNA, 260 bp, Unknown
  Description of Unknown: RightRegion for integrase B11052 sequence
ctggagaccatgaagcccagaacaacgggtgcagagatgttggaactggagatgcccgcatgatggaaacggctgccagcaaagtcatgagcgacgacaactttcgaatcaccacgcgcgtcccattcaaactcaaacgccgaccgggtatcaaaaaagttgtgatggcacctgaaacggccgaaggtcacttgaatggcgagtgcatggacaaaagcaaccaaattgccttgctccaagggctcgctcgagcacactac

SEQ ID NO: 37052 - DNA, 260 bp, Unknown
  Description of Unknown: RightRegion for integrase B11053 sequence
cgcaatttaataaaagaggttatattagatagtgagtttaatatttcacttgattttatataatctaattcttactaacttatactttcctgtaggggtgttatagttagtatttagggggcttttagccctcttttttatattcaaaatctattttagatagatatacccgctcttttatttttgaagcttttaccctgtccgcataatcatttttaataacccaacgcaacgccgccgccattgctgtattgtctttg

SEQ ID NO: 37053 - DNA, 260 bp, Unknown
  Description of Unknown: RightRegion for integrase B11054 sequence
ataataaaagaaatttatttgaatgaagcctttgaaattactggctttatattttatatctaggacttgtactaaataactatttcctagcggttaacattaattagtacaagtctattaaaaatggcgattagaaattctaaccgccatttattttacgcttttacaatcgcagcgtcaaatcctgctgctttcaatttttcctgcaaggaaatagcatttgctttgttgcgatacgctccgacctgtacacgataaat

SEQ ID NO: 37054 - DNA, 260 bp, Unknown
  Description of Unknown: RightRegion for integrase B11055 sequence
gagttaattaaatcggtgtctgtttctaatggtgaagttatagaaatagaattatttatttagctgaactaattgatactgattgattctagcctcaaattccgcatctgtaatactcattagctctactctaagaggtggttgtaaatgctttattaaagcccatctcttagcatttttgattagtaattctaaaccggacatatggttaatacctggaaaacgtaattattattttaattgaattagatcaaagtgtt

SEQ ID NO: 37055 - DNA, 260 bp, Unknown
  Description of Unknown: RightRegion for integrase B11056 sequence
ataataaaagaaatttatttgaatgaagcctttgaaattactggctttatattttatatctaggacttgtactaagtaactatttcctagaggttaacatcaattagtacaggtctattaaaaagggcgattagaaattctaaccgccctttattttacgcttttacaatcgcagcgtcaaatcctgccgatttcaatttttcctgcaaggcaatagcatttgctttattgcgatacgctccgacctgtacacgataaat

SEQ ID NO: 37056 - DNA, 260 bp, Unknown
  Description of Unknown: RightRegion for integrase B11057 sequence
tcccgcgttctgcgccgcatagaaatagacgccgcccacaatatccacatcttccccgcctgatttttttctccgtggttgggcataaattgatagccctataggtttatcaatttatgcccaaatagcaaaaagctccctgacttcactgcagggagctttttgttattttgtgcgatttttcaggatctcaaggacgaaggttttcagggcagaaagcccggccatgccagcggcaagaagcccggcagaccaagcgc

SEQ ID NO: 37057 - DNA, 260 bp, Unknown
  Description of Unknown: RightRegion for integrase B11058 sequence
ttctggcgcgcgatcctaacgcgcatagagataacagacggtgacatccgtttttatttttagctcggcttgtgtactaattattccgccgcctggggggcggtataattagtagcattatagccaaattatccggctaatttttgcgcattgaaataaccggataacatgctataataaaagacagttaaggcaatccaacaacaaaacttttcggaggtgcgaaacaatgacacattaccttgcgtcagtacaaaaca

SEQ ID NO: 37058 - DNA, 260 bp, Unknown
  Description of Unknown: RightRegion for integrase B11059 sequence
aggtcgatcataaaagaaatctgggttgatgcccagaagaacatccgtgttgtttttttgtgaccttgatgtagtgctaagtaaccttgacgggtccgttgaggtcatttactaccacaattttcttgaactattctgctatatttgctataataacactggcgatacaaacaatccacaattttcatattcacctttcttccctttactttacgggtgacctggttcttctgttgcagcagttgggccaggtctttttg

SEQ ID NO: 37059 - DNA, 260 bp, Unknown
  Description of Unknown: RightRegion for integrase B11060 sequence
ataataaaagaaatttatttgaatgaagcctttgaaattactggctttatattttatatctaggacttgtactaaataactatttcctagcggttaacattaattagtacaagtctattaaatcgaactataatgaatgcattattatcaaacctaggttttactgtaaccattgattttactgtgttttgagcattttttatttgcttataaaatggcaaatttgccattttataagcaaataaaaatgcaacacgaaa

SEQ ID NO: 37060 - DNA, 260 bp, Unknown
  Description of Unknown: RightRegion for integrase B11061 sequence
attattatcaaagaaatcaaaatttaccctgataggcacatagaatattccttaaatgtttgaaaaatttttaatgaattttattacttaatatttctccctctgtagttgcagtaatattatgtaatataatccccgccctcatgagagagcggggactatcatcagtgcttcacgacaaactcatagtaccgagcaagcttgtcgggagcggcgtcctgatcatccagaaacgctttcgcaatttcggcatagaagtc

SEQ ID NO: 37061 - DNA, 260 bp, Unknown
  Description of Unknown: RightRegion for integrase B11062 sequence
gctattatagactatattgaattggataatcaagaggtctcaatacattggaaatttttttagcctcgtgtaacatattgtgtttgaacgattgtaaacgttagaacataatgtgttacattaggccgctttatcctcttcgtcctcttctttggtctcgatcacgaattcagttgttcccgaatccgcaaggccttcgcctatgatgtaaccgaccaccgaagccgccgcaaggattattcctgcgaccttctgtgcga

SEQ ID NO: 37062 - DNA, 260 bp, Unknown
  Description of Unknown: RightRegion for integrase B11063 sequence
tcaatcgaggttgaggggctttacccgaagcaagtcttttttatcggtcaggaaagactctaacgtacatgacagttctgtcacgttacttagaggctaccatccctataccatagtgaagtattttgcaaccttatacggtggtgcgtcctcgtcgttcaggaagtcctgtgccaagtcgaaatagaagtccggagagtcacctgcatatttctgtccagtatccttggagtcgttataatacatattcattgccagat

SEQ ID NO: 37063 - DNA, 260 bp, Unknown; identical to SEQ ID NO: 36057
  Description of Unknown: RightRegion for integrase B11064 sequence

SEQ ID NO: 37064 - DNA, 260 bp, Unknown
  Description of Unknown: RightRegion for integrase B11065 sequence
tggcgcaacctaattcaagaaatacatatcaccgacaacggttacgaaataattttcctatgacagctccggctgtcttttttattccgagtaactatatccaacctgtaggctacgccatgtcagtcggaattttaggcatgaaaaaaggcagtcatttcagactgccttagaaaggaatggtatgctgaacagcatcccagaaaggtgtgggaaacatgaaacccacaatcaaattatagcacgacaagttcagattt

SEQ ID NO: 37065 - DNA, 60 bp, Unknown
  Description of Unknown: RightRegion for integrase B11066 sequence
atcatcaacacattcatttctggtatcgtaatctatgacgaccactcggttattgcctac

SEQ ID NO: 37066 - DNA, 260 bp, Unknown; identical to SEQ ID NO: 36167
  Description of Unknown: RightRegion for integrase B11067 sequence

SEQ ID NO: 37067 - DNA, 260 bp, Unknown; identical to SEQ ID NO: 36045
  Description of Unknown: RightRegion for integrase B11068 sequence

SEQ ID NO: 37068 - DNA, 260 bp, Unknown
  Description of Unknown: RightRegion for integrase B11069 sequence
agtattgtaaaagaaataaaaatatcccccaacgaatttgtggaggatattatatttttttagtttttgttatgcagtaactagccgtaaccaccgggttaaaaccagttactgcataacaaaatattaaaaataaaggagatacagttacattatacagaaagaaagaggacgtttcaagcgccctcttttatttttcgcaaaaccgaacgatattctcgcggatacattgcttctatggctttcatgtgttcgtcaag

SEQ ID NO: 37069 - DNA, 106 bp, Unknown
  Description of Unknown: RightRegion for integrase B11070 sequence
agaagcataataaaggaaataaggattttcaacaaagaagtagttggagtcaattttttataactgttttttggtctaactacttcgcaccattctcaccgataag

SEQ ID NO: 37070 - DNA, 260 bp, Unknown
  Description of Unknown: RightRegion for integrase B11071 sequence
agcattgtaaaagaaataaaaatatcccccgacacttacgtggaggatattatatttttttagtttttgttatacagtaactagccgtaaccaccaggttaaggtcagttactgtataacaaaatatgatagaaataaaggagaagtaattatattatacaagaagaaagaggacgtttcaagcgccctcttttatttttcgcaaaactgaccgatattctcgcggatacattgcttcgatggctttcatgtgttcgtca

SEQ ID NO: 37071 - DNA, 260 bp, Unknown; identical to SEQ ID NO: 37068
  Description of Unknown: RightRegion for integrase B11072 sequence

SEQ ID NO: 37072 - DNA, 260 bp, Unknown; identical to SEQ ID NO: 36170
  Description of Unknown: RightRegion for integrase B11073 sequence

SEQ ID NO: 37073 - DNA, 260 bp, Unknown
  Description of Unknown: RightRegion for integrase B11074 sequence
ctccagctgattgacggggtacatatcgacatggaggacgttcgtatcgattggtcgttctaacgtggggtgggggtgatccccttccttcactataacagagatagccaaattaaacaccccatttattaggctatttgacaaatcatggagaataaaaaaagccgcaggtcttttcctgcggctttttgtttataatccgagttctttcgctttcttctgcacaaagtcacggatagcctggttgatgaattgtttct

SEQ ID NO: 37074 - DNA, 260 bp, Unknown
  Description of Unknown: RightRegion for integrase B11075 sequence
cggtcaattataaaagaaatccaccttgatcagaacaagaatttcaaggtggttttcttataaactatatatggtactaacttacactgtccatctggagaggtatacttagtaccacatcatgcagatgatctttatatataaagcaggaggccgcagggatcaaccccgcggcccgcgctttttcgttaaaaggaaggagtatgaaaaaatcaccaaagaaacactgcactcatcaaccatatacatcataccacatt

SEQ ID NO: 37075 - DNA, 260 bp, Unknown
  Description of Unknown: RightRegion for integrase B11076 sequence
caaaaagcaatgaaaggacgtaataaaaatgaaaaagataacagtaataccacaaacaattaatccgctcacgaataatccgtttaataatgtagagagacgcaaagtagcggcttatgctcgggtttcaactgatagtgatgaacaaatgacgtcacttgatgctcagattgacttttacactaattacatcaaagcaaatccaaagtgggaattcgttaaagtatattatgacgaagggatttcaggaactaacacta

SEQ ID NO: 37076 - DNA, 119 bp, Unknown
  Description of Unknown: RightRegion for integrase B11077 sequence
caaaaagcaatgaaaggacgtaataaaaatgaaaaagataacagtaataccacaaacaattaatccgctcacgaataatccgtttaataatgtagagagacgcaaagtagcggcatatg

SEQ ID NO: 37077 - DNA, 260 bp, Unknown
  Description of Unknown: RightRegion for integrase B11078 sequence
caaaaagcaatgaaaggacgtaataaaaatgaaaaagataacagtaataccacaaacaattaatccgctcacgaataatccgtttaataatgtagagagacgcaaagtagcggcttatgcccgcgtttcaactgaaagtgatgaacaaatgacgtcacttgatgctcagattgacttttacactaattacatcaaagcaaatccagagtgggaattcgttaaagtatattatgacgaagggatttcaggaactaacacta

SEQ ID NO: 37078 - DNA, 260 bp, Unknown
  Description of Unknown: RightRegion for integrase B11079 sequence
caaaaagcaatgaaaggacgtaataaaaatgaaaaagataacagtaataccacaaacaattaatccgctcacgaataatccgtttaataatgtagagagacgcaaagtagcggcttatgctcgggtttcaactgatagtgatgaacaaatgacgtcacttgatgctcagattgacttttacactaattacatcaaagcaaatccagagtgggaattcgttaaagtatattatgacgaagggatttcaggaactaacacta

SEQ ID NO: 37079 - DNA, 260 bp, Unknown; identical to SEQ ID NO: 37078
  Description of Unknown: RightRegion for integrase B11080 sequence

SEQ ID NO: 37080 - DNA, 260 bp, Unknown; identical to SEQ ID NO: 37077
  Description of Unknown: RightRegion for integrase B11081 sequence

SEQ ID NO: 37081 - DNA, 260 bp, Unknown; identical to SEQ ID NO: 36095
  Description of Unknown: RightRegion for integrase B11082 sequence

SEQ ID NO: 37082 - DNA, 260 bp, Unknown
  Description of Unknown: RightRegion for integrase B11083 sequence
ctgttgcagacgattcgggtagatcgggaaggtcaatacctttctgttccgcgtatgttttaagccgaacgcggacggcctcagaaaataacatctagctagccatcggtcgaagaaattgcggcaccggctaaagccatgtgtctgcgaatgctgaggagttgaattgcgtttgagagggtttcttgcatcccatagcgcttcccattgtcgtcaaaaatggcccagccgccaggtacattttgcagataaaaaatcat

SEQ ID NO: 37083 - DNA, 59 bp, Unknown
  Description of Unknown: RightRegion for integrase B11084 sequence
gaccccgaggctctggccgacgaggagaagctcaccgaacgctggggcaaggcttcccc

SEQ ID NO: 37084 - DNA, 260 bp, Unknown
  Description of Unknown: RightRegion for integrase B11085 sequence
atcaaagaaattcgtttcaacaaatccagaaattttttattgatttcgtgtagtgctaattaacatgacagtcatgtcttgttaataaaaacaggctatggtataatggtcatagcaggtttttaaagttttcataattttctacttcctttcttcatgttggctgtacggttcccccttgtccgtacagccattttttattaatcaaattccaaaaaaagaagggatacccgaaggtatcccataaggtttctaaggtt

SEQ ID NO: 37085 - DNA, 260 bp, Unknown
  Description of Unknown: RightRegion for integrase B11086 sequence
cgaagctttgtcgcgaaaatcaccgcagaccccgccaaaaaactgaatgtcgagctgacctgaaggccctgtttacaaatgtttagtacccggacggctattggacggaagtaataccgaccagaaagtgattttgttgattatcagcatttgagtatgaataaaagcgcgatcgtgaagcatttctgctcctcgatcgcgcttttttcaggtgtcaggatacttcggccgcacggcgcaggttacgaagcgcgtctgcc

SEQ ID NO: 37086 - DNA, 260 bp, Unknown
  Description of Unknown: RightRegion for integrase B11087 sequence
tggctgaaggtagtgcacgcagtgacgatggacgctgatttttcgatccttagtttgtactaaaatcattcgtcagttaacgagtgaaataagcacaaaatatttttatataaattcgtcgtttgcttattgactttatataaactctatgataagatacagatgttcccagacgggacgcaaaaagagagacggaggaaacaaacatgaagcgcatcatcaaaggtaaggtttacgacaccgcaactgcaaaagagctg

SEQ ID NO: 37087 - DNA, 260 bp, Unknown
  Description of Unknown: RightRegion for integrase B11088 sequence
gcgatcatcaaagagatcagatggaacatcaaccgtgaatttgaagttatttttttgacctgacgacacctactaagtgaacgtagccatctggtcaaggtaagttagtactggtcaaatagcaatattattacatataaaaaggccccgagaggatcatctcctcccggggcttttgttctatattagatcaaagactctcccacatggctctccatgtcttcgcgccgaccacgccgtcctgagtaagcggatttccc

SEQ ID NO: 37088 - DNA, 260 bp, Unknown
  Description of Unknown: RightRegion for integrase B11089 sequence
cttttagagcttacacaaccgacgttttacgtgcagggcgacgttcttacgctggagttttgacgatgcacgaaggggcactatgttacaatagatgtgcctcacgaggttcgagcctctaggcactctgcgctctggaaggagcaacagcatgtcaaatatagcaccggaactaaaagtatgtttgaaatgtggagtggcatatccacttgatgactaccgtattgagatgagacgaggtaagccatatcgtcggcccg

SEQ ID NO: 37089 - DNA, 260 bp, Unknown
  Description of Unknown: RightRegion for integrase B11090 sequence
atctccatcgggtctttttaccggatattgcatcgctggggcatggcacaatatgtaaaataattttacatttcctatttacaaacgtaaaataatttgacatatataggtcatcaacaacagagacgcagttatgaccacaatcaccaatgtcgacacctacaagtcgcgggaagccatcattctcaccaagccctctgataacctcaactggtgcgttgccgcgtacgaagtcgaggacggctattggttctggcgct

SEQ ID NO: 37090 - DNA, 260 bp, Unknown
  Description of Unknown: RightRegion for integrase B11091 sequence
ataaaccaagtacaagcaagattcatactaaaaacaggaatggagttcatagaaaacctataacaaaaaaacggtaaccacaataatggttgccgtcttttttttgcttaaatttcaaactcatcagctggtaatggtttacactcttgcctttccttatctagtaattgaagtttcggttttcttttacgataatgattcatgtcattaaggatgatatcacacatcttaaacaattctttattaaattcttcaacatc

SEQ ID NO: 37091 - DNA, 260 bp, Unknown
  Description of Unknown: RightRegion for integrase B11092 sequence
cggtcagttatcaaagaaattcggtttggagtcgataagcatatcgacattatttttgtctgatttgtcccgtggtaaatagtggcgtccgtccggatggagtcgattagcacgggacacaaaaaccacgcaaaatgtaaaatagttgttgacatactgtgcaatgcgtggtatcatataatcaagttaaggggtaggataacagtaaaacaaaggaggacaaaatgagatacttcagcgaagaggaaattagaaacctg

SEQ ID NO: 37092 - DNA, 260 bp, Unknown
  Description of Unknown: RightRegion for integrase B11093 sequence
aatttattgattgatcggatcgttcttgaagatgacacgattaaaatcgaatggaatttttaaaaaaaccactcgcttatgagtggttttaattatgctctcgccggcacttccaaaccggcatttttgattttttcaatcaacgtttcagttcttaatctgcgttttccgattcctttgattccgttagcgtttgcgaaatctttcagttgttgattgtatgccaatccagcttcccaacgtctgttaaattcattgtc

SEQ ID NO: 37093 - DNA, 260 bp, Unknown
  Description of Unknown: RightRegion for integrase B11094 sequence
tttgaaggtgagaagataatagttagtttgcttgatgggacggagattgaggttgtaatttaataaaggattaaaaagagatagttgaggtgatatagagtcacttcgggtggctttatgtctatgtcgtattatgtaaaataatgcattatagaaaacattgatttatatgcatgcatatgtatataattgttatggaaattatatgaaacatatcttattattacaaaactttcctcaaattttaaaggacaagcata

SEQ ID NO: 37094 - DNA, 260 bp, Unknown
  Description of Unknown: RightRegion for integrase B11095 sequence
actatcctgcatcatatcgagataaaaccggacggaacgtacaagccgttgttcaacggttaagtgtcattcctataacgcaccaccagtagccatataaaaatgccccaggcggaccaaacctggggcgcggcgggtggagggatcccgccaactccgggcggagaaggagcaaaacgcccggaaacctatgcaattttataacccatcgggtatgtttcgtattgcttcgtcgtgttttgtacccgatatgatacaac

SEQ ID NO: 37095 - DNA, 260 bp, Unknown
  Description of Unknown: RightRegion for integrase B11096 sequence
gaagggatcgcgggcgtcatccgcgagatggtcgcaccgcacaatctggaggccgccgaatgacgaacgccaatgacacgatccgcgtgctgatcccgttgaaggtccgcaagaagaacggtcggccaaaaataatgccgcccgccaactatctgccgagcgaggaccagacgcaggatccgcatgtcctgcgcgccgtaggccgggcatggggctggcggcggcgcatagaggcaggcgaattcagcacgatccaggaa

SEQ ID NO: 37096 - DNA, 61 bp, Unknown
  Description of Unknown: RightRegion for integrase B11097 sequence
ttcatggcgcagggctatatcgaccagatcctttataacgaggagatgaacaccctgctcg

SEQ ID NO: 37097 - DNA, 260 bp, Unknown; identical to SEQ ID NO: 37090
  Description of Unknown: RightRegion for integrase B11098 sequence

SEQ ID NO: 37098 - DNA, 260 bp, Unknown
  Description of Unknown: RightRegion for integrase B11099 sequence
gacggcatcggtggggtcatccgcgagatgatcgcacccgctcgcatggaggctgcggagtaatgacgcaagccaatgacacgatcagggtgctgatcccgttgaaagtgcgaaagaagaacgggcggccgaagctcctgccgccggtggattatcgcccgagcgaggaccgtactcccgatcctcacgtcctgcgcgccatcggccgggcgtggagttggcgccgccgcatggaagccggagagttcgccacggtccat

SEQ ID NO: 37099 - DNA, 260 bp, Unknown
  Description of Unknown: RightRegion for integrase B11100 sequence
acacttatcgaccacatagacattgacgaaagccgcaatatgcggttgttttttaaggcgtagtatgtactattgtgttggcaacgacggctgcgcagtcaatagtacatacttagcgcccaacaatgaacggacgaacgctgtattttgcgccatccgtgccatgtgtggtaatccaaatctgcgcgttttcttcggtgaaaaacaggcaacttgtaggctctccatcacggaggacttcccaaaactcgttgctcatt

SEQ ID NO: 37100 - DNA, 260 bp, Unknown
  Description of Unknown: RightRegion for integrase B11101 sequence
aaactaaagctaaaagaaatccggctgtaccaagatcgccggatagacttcgatttcctttaattccatagttacacctaaccaaatggttaatgtaatctatggaacgcccccgcccattgtaggcgggggcacaatttattcatgttccacgatcccgtggtaatacgctgccagctttttctttgctcccgggccgtccttgtccatcagaaatgcccttgccatatccgcgtaaaactccgcaatggacacgccgt

SEQ ID NO: 37101 - DNA, 260 bp, Unknown
  Description of Unknown: RightRegion for integrase B11102 sequence
aaactaaagctaaaagaaatccggctgtaccaagatcgccggatagacttcgatttcctttaattccatagttgtacttatccaaatggttaatgtaatctatggaacgcccccgcccattgtaggcgggggcataatttattcatgttccacgatcccgtggtaatacgccgccagctttttctttgctcccggaccgtccttgtccatcagaaatgcccttgccatatccgcgtaaaactccgcaatggacacgccgt

SEQ ID NO: 37102 - DNA, 260 bp, Unknown
  Description of Unknown: RightRegion for integrase B11103 sequence
ttgcggtcggtgtccattgcccgtcgcggacttgtcgccggtattcaggttcgaacgacttgaggcggctcagcagcgcttcgcgcagggtgagtggcttgctcatgccgcccccttgaagctggcgcaccagcgggcgaactcgatgccctcgtccttgggatccgggaagcccaggccgcagcgctcagagctccagtggatgcactgctcgcaggtggtggtggactccaggtccggcagcccgaccgccaggccgg

SEQ ID NO: 37103 - DNA, 260 bp, Unknown
  Description of Unknown: RightRegion for integrase B11104 sequence
cgaagcgtcatagaccaaatatacttcgataatgacaaaaatattaagattgtgtttcgctaatcagactcacgttaatggaagtatccgtgcggatagtaccgattacttgcggtttaggaatccaaacatttgttctgtttttaggataacaaaaaaggggagtcttttcaactccccatagtgaaaaacatatatgcacagtgatgtttctctcggcttatggaactgtagtgcctcagagtgggctaataagaatc

SEQ ID NO: 37104 - DNA, 260 bp, Unknown
  Description of Unknown: RightRegion for integrase B11105 sequence
acacttatcgaccacatagacattgacgaaagccgcaatatgcggttgtttttcaaggcgtagtatgtactattgcattggcaacgataggtgcgttatcagttgtacacgattttgccaaaaaatgcgaactctccgtaatatccgtgcaagatattacagagagttgatataggcttagcggtttcgtcaaggataataaggctctattgtgtaggttgcgccatcgtactgctgactgatatagtattcagcgtttc

SEQ ID NO: 37105 - DNA, 260 bp, Unknown
  Description of Unknown: RightRegion for integrase B11106 sequence
aaactaaagctaaaagaaatccggctgtaccaagatcgccggatagacttcgatttcctttaattccatagttgcacctaaccaaatggttaatgtaatctatggaatgcccccgcccattgtaggcgggggcataatttattcatgttccacgatcccgtggtaatacgctgccagctttttctttgctcccggaccgtccttgtccatcagaaacgcccttgccatatccgcgtaaaactccgcaatggacacgccgt

SEQ ID NO: 37106 - DNA, 260 bp, Unknown
  Description of Unknown: RightRegion for integrase B11107 sequence
gacgggttgagctctgtcgtgcgcgacatgctcgccccgcggccgaaggagaaggtcgcatgagcagcgcgcccgcgacactgaccgttttcattccgctgaccattcgcaaacgcaatggccggccgaagatcatgccgccggcggagatgatgcccgattacgacgacaaaggcgtggatccgcacattctgagggcgatagccaaggcatggagctggcggcgcaagctcgacagcggccaggtggcgaccattcag

SEQ ID NO: 37107 - DNA, 260 bp, Unknown
  Description of Unknown: RightRegion for integrase B11108 sequence
gtcgatggacttatgggcctcgcgcgcgaggtgctggccggcggcatcggagaagcggcgtgacccgcgccacgccgatcccagataccgtgacgctgcatgtcccgctaacgttggtaaagcgcggcggacgaaaggagatgcagctacccgagggtgccgcgcagccgcgcaggaccgacaacacgctggtcaaagcactggcccgggcatttcgctggaaacgcatgctggaatccggcgacttcatgaccatcacc

SEQ ID NO: 37108 - DNA, 260 bp, Unknown; identical to SEQ ID NO: 36042
  Description of Unknown: RightRegion for integrase B11109 sequence

SEQ ID NO: 37109 - DNA, 260 bp, Unknown
  Description of Unknown: RightRegion for integrase B11110 sequence
agcatgaaagactcggcaaaggaaaggagtctaaagcagtggcaacaccggaaaagcaaataacgataatcccaggggtcataaaatacaccgaaggatttgaatcaggatatcctggcaaaagaaaagttgctgcatatgccagggtctccacaggaagcgaggagcaactgacatcgtacgaagcccaaaaggactactacgagatgaaaataaaagaaaatccagtctggcaatatgcaggtatttatgcggacgag

SEQ ID NO: 37110 - DNA, 260 bp, Unknown
  Description of Unknown: RightRegion for integrase B11111 sequence
aaggtccttacaatcgaattcaaggaatctgagacaagtgcagaaaaaaataaaaaaatttaattccataataggaattaaattgacaacaaggaatataagtgatattatatagatgcgaggaggagatgagaatggataagaataagaaagccattcttgcacagagagtaaaagagaggatgaggatgcttgacatgaatgcactacagctttcagagagaagtggtgtatcacagagcatcataagccgtctaaca

SEQ ID NO: 37111 - DNA, 260 bp, Unknown; identical to SEQ ID NO: 35754
  Description of Unknown: RightRegion for integrase B11112 sequence

SEQ ID NO: 37112 - DNA, 260 bp, Unknown
  Description of Unknown: RightRegion for integrase B11113 sequence
aaactcaaaataaaagaaatccggctatacaaagaccgccggattgaatttgactttctgtaattacttagtttatataatccgttaggttgcataaaactaagtacacaagaatatcccccgccaaaacaggcgggggatactttatcctcgcatctttcgcatcacgttatcatacattcgcgcgttggtcactttcagcgcatccatcaactcgtccactatggcccacgcctgttccggcgcgcgggatgataccg

SEQ ID NO: 37113 - DNA, 260 bp, Unknown
  Description of Unknown: RightRegion for integrase B11114 sequence
ttgatcgaaaaaataatcatcaatcaggacaaacagatcattgacattatctttaatacatgaccatgtgtgtatctttggattgcccgaggaaccccccaagttacacacattaaaaagaaaaggcgatggattaacagtccaccgcctctctttttattgaatttttcgcataacactgtcataaagccttggattgaccaccataagagtagtcataagctcgtccatgaggagccacacactctctgcatttctgc

SEQ ID NO: 37114 - DNA, 260 bp, Unknown
  Description of Unknown: RightRegion for integrase B11115 sequence
attattaaacagatcgtggtcgaccttgacggccatccggtagatgtaatttttttagactaaaaatgtactaacaggttgcgtcctgcgtcattgttataaaaagtacattataaaatacataaaaatacaaaactttttttataaaatcacttgctatatgtgtacccatatgttatagtatagatacaagttgagagggaattgaaacagaaaaggagaaagaaatgtttaaggattacagatatatcaatgcagga

SEQ ID NO: 37115 - DNA, 260 bp, Unknown
  Description of Unknown: RightRegion for integrase B11116 sequence
gatggcatcgccggtgtgatgcgggacctgatggtgccacgcaggcttgaggccgcagaataatgggcgtgtccgacaccatccagatctttgtacccctcaaacttcgcaagaaaaatgggcggccaaaaattctgccgcccgccgattacctgccgagcgaggatcagacacaggacccgcatatcctaagagccatcggccgcgcgtgggcctggcggcggcgaatggaggccggtgagttcggaaccgtgcgcgat

SEQ ID NO: 37116 - DNA, 260 bp, Unknown
  Description of Unknown: RightRegion for integrase B11117 sequence
attgacgtttattttgccgatgtatatactagtggcaatgcaacagatgttgacttgtcataagtagatagacggattattccaaaatcttcgcatttctgcacttttgccttaactttctaatatggcaacgatgattccaactatagttcgaacaatccagacggttttgcttgaaacccgattttttgctgattttgcggctggtaagggtttagcaatataggtaatatctctacactaccaagtctggaaacgcc

SEQ ID NO: 37117 - DNA, 260 bp, Unknown
  Description of Unknown: RightRegion for integrase B11118 sequence
gtggtgagcaaaattcttgttgacgagcagaacaatatcagcgtggagtttctaaccttttagggaataccgtcacacattacgcagaaggatagaaatttggagaaaaaaataaccaccgccgtagcggtggaattctgggcggtgacgagggaacagaatcacgcgtccaagctgttatactgtttacgcttgacattgatgaacgcgccgatgaacgccgccgcaatcgcaagcgtcccgcagatttccttggcata

SEQ ID NO: 37118 - DNA, 260 bp, Unknown; identical to SEQ ID NO: 36134
  Description of Unknown: RightRegion for integrase B11119 sequence

SEQ ID NO: 37119 - DNA, 260 bp, Unknown; identical to SEQ ID NO: 36086
  Description of Unknown: RightRegion for integrase B11120 sequence

SEQ ID NO: 37120 - DNA, 260 bp, Unknown; identical to SEQ ID NO: 35977
  Description of Unknown: RightRegion for integrase B11121 sequence

SEQ ID NO: 37121 - DNA, 260 bp, Unknown
  Description of Unknown: RightRegion for integrase B11122 sequence
cttcgatcggtaacggtgggggaacgtggcgacccgatcgaacctcttcctcgtagctgctgagcatcgagagcagggcttcgcgcactgtctttgggtggctgcacttccgcatcctcacccctctacgacgtacagattgcagtccctggcgaaccctggaccctcttcgatggggtccgggaatcccaggctgcaaccctcgcccagccattcgcggcagtgttcacaggagcgttcaccgcgacgcggtggtgggc

SEQ ID NO: 37122 - DNA, 260 bp, Unknown
  Description of Unknown: RightRegion for integrase B11123 sequence
tggaggggcatggttaaagaaatcgtgttcttccctgatcgccatctggagctgcatttttagtggttcttatgcaacccatccatctggattattccactaagtaccacacagaaaagccgcccatccgggcggcctctgtctactcttttgtctcgaccatggcgatcacgtcaaccagcgcgctaagcgtctcgacgctcaggcgctccacagcctcggcggggatcttgtcccaagcggcccggaacgtctcgcca

SEQ ID NO: 37123 - DNA, 260 bp, Unknown
  Description of Unknown: RightRegion for integrase B11124 sequence
aaaagcgttgtagataagattgtcacagacggagaaaacttcaacgtgatattcaggtcttaaaagatactatttcaacatagacagttgttcacgttgatttagtatctaatgcagaaaagggggcggtatttccgtccccttccctgttggagaagttactccctctccatctgttcgatcatgcgctgaatgctcatgcgagtcttttcatcaggcgcttcatccattgtgcgccgcaggttttcaatgtactcctg

SEQ ID NO: 37124 - DNA, 260 bp, Unknown; identical to SEQ ID NO: 35988
  Description of Unknown: RightRegion for integrase B11125 sequence

SEQ ID NO: 37125 - DNA, 260 bp, Unknown
  Description of Unknown: RightRegion for integrase B11126 sequence
atcgagcgaatagaccttgatgcggaaaacaatccgcatattgtgttccgctctggtatataatccttcactatgggacagcattgttatgaattatatacctagcaaagggagggcgattgccctcccccgctttacatctgactgtacagctgctgataccgcttgaccttctcggccttctcgatgcttttcttatgcagatagtcatagactgccatcatgttctccggcggatctccatgctcccggcgatagtc

SEQ ID NO: 37126 - DNA, 260 bp, Unknown; identical to SEQ ID NO: 36055
  Description of Unknown: RightRegion for integrase B11127 sequence

SEQ ID NO: 37127 - DNA, 260 bp, Unknown
  Description of Unknown: RightRegion for integrase B11128 sequence
acggtcagtaaaattgtcatcacaaacgaagatgacttttttgtgtatccgacttcgccataattattgttacctgtatgttatactattattggctaaatagaaaaaccgccccgaaggacggcttttctataagcgttggcccctattttaccacgcattcgtaatatctcgcggcttttccaggccgaacatctttatctttcaaaaaggcatttgccatatcagcgaagaaatcgacgctaccgcagacattgtgc

SEQ ID NO: 37128 - DNA, 62 bp, Unknown
  Description of Unknown: RightRegion for integrase B11129 sequence
ggaacattgttggtagtgttcctggatggaacggagattgaatgtaaaaatgaagaggaata

SEQ ID NO: 37129 - DNA, 260 bp, Unknown
  Description of Unknown: RightRegion for integrase B11130 sequence
aaattgaaagcgaagattaaggaagcggaaagacaagaagagttaaaaaggagggtgcaataatgccgaaggttacagtaattccagcaacaaaggatttttataccggcgttgataataacacgttcaaaaagaaaaaggtggctgcatatgcgcgagtttccaccgcaagtgaagaacaggaaacctcatacgatgcgcaggttgattactatacgaagtatattcagggacgaccggattgggagtttgtaaaagtt

SEQ ID NO: 37130 - DNA, 260 bp, Unknown
  Description of Unknown: RightRegion for integrase B11131 sequence
aagcaggaagcccgtgaacgcaacctcaggaaaggaaacaccccatgcaaacaacccgcgtaaccctcatcccgcccaccatgagcctgcacaccgcggcgccgctgtccaagaccgctgttcgccgggtctgcggctatgcccgcgtgtccacggacaatgaggaacagttgggcagctatgaggcgcagatggcctactacacccaattcataaaggagcacgagggctgggcctttgtcgggctctacagcgatgag

SEQ ID NO: 37131 - DNA, 260 bp, Unknown; identical to SEQ ID NO: 35701
  Description of Unknown: RightRegion for integrase B11132 sequence

SEQ ID NO: 37132 - DNA, 92 bp, Unknown
  Description of Unknown: RightRegion for integrase B11133 sequence
gagtttgtgctaaaggctgtagcgaatccgactgaggtaactcaagtggagttgcgtatttagcttttttataatcttcaattaaagatata

SEQ ID NO: 37133 - DNA, 260 bp, Unknown
  Description of Unknown: RightRegion for integrase B11134 sequence
gagtttgttctgaaagtgacagcgaatccgactgaggtagttggagtggatctaaggatttagctttcttataatcttcgatcagggagataagaatatcttttatagacagaaaggtaatacctaattagtgagtcttaactatctatacaagttaagataggtacgtatgtaattacggatacaaaacgacagccctcacccttacaagtctcttaatgttacttccggttgaaacttagtttgtcttttagcgttac

SEQ ID NO: 37134 - DNA, 260 bp, Unknown
  Description of Unknown: RightRegion for integrase B11135 sequence
gagtttgtgctaaaggctgtggcaaatccaactgaggtaactcaagttgacttgcgtatttagctcttttataatcttcaattaaagatataagaacgtcttttactgacaaataagtaataaattctaggagaaatatattaactagctttctagatgtgcaaacgtacgttactgaatatagccagcggaactgtctttacatctcgactgcaaatacattttagctgcttctatcataacatcattaagagttgaat

SEQ ID NO: 37135 - DNA, 260 bp, Unknown; identical to SEQ ID NO: 36051
  Description of Unknown: RightRegion for integrase B11136 sequence

SEQ ID NO: 37136 - DNA, 260 bp, Unknown; identical to SEQ ID NO: 36067
  Description of Unknown: RightRegion for integrase B11137 sequence

SEQ ID NO: 37137 - DNA, 260 bp, Unknown; identical to SEQ ID NO: 36072
  Description of Unknown: RightRegion for integrase B11138 sequence

SEQ ID NO: 37138 - DNA, 260 bp, Unknown; identical to SEQ ID NO: 36141
  Description of Unknown: RightRegion for integrase B11139 sequence

SEQ ID NO: 37139 - DNA, 190 bp, Unknown; identical to SEQ ID NO: 37023
  Description of Unknown: RightRegion for integrase B11140 sequence

SEQ ID NO: 37140 - DNA, 260 bp, Unknown
  Description of Unknown: RightRegion for integrase B11141 sequence
gaaatgaaggaaactgcacggcaaagaacactacaacgctacgcaccaaaggaggtggagtgatggcaagagaagtaagggtaatccctgcaagtgtacacaaatttacgaccgttccttttggctctacggtaaggaaaagggtcgcaggctacgctcgtgtttctaccgaccttgaggaacagctcacaagctacgaggcgcaggtggattactacaccaagtacattcagaacaatcccgattgggagtttgtcgag

SEQ ID NO: 37141 - DNA, 260 bp, Unknown
  Description of Unknown: RightRegion for integrase B11142 sequence
gtgcggcaaatcacagttgatgcggagaatcacatagaagtggagtttatcccctttgggtaaactccttggcgtgttaccaaaaaggggaaaaagagtggagcagattcaattctgctccaagtcttttctgataagtgctttgatatatccttgaacgttgctaatcgttcgtaaccgttctatgatgtccgcatccgttgccttgttcagcttcatatgcacttgtatggtattcgccgcatcatactttgcgttcg

SEQ ID NO: 37142 - DNA, 260 bp, Unknown; identical to SEQ ID NO: 36091
  Description of Unknown: RightRegion for integrase B11143 sequence

SEQ ID NO: 37143 - DNA, 260 bp, Unknown
  Description of Unknown: RightRegion for integrase B11144 sequence
atgaaggaacaggctcgattaagagcactcaaacaacatcatggaggtagagaaaatggctaaagtcacagtaataccatcaacaattaatcccattacccaaatgccactaaatgcgaatcaagttaagaaagtagcagcatatgcaagggtttcaacaaatagcgatgagcaatatactagttacgaggcacaagtgaatttctataaaaaatacatccaggagaaacctgactgggaatataccgaagtatacgctg

SEQ ID NO: 37144 - DNA, 260 bp, Unknown
  Description of Unknown: RightRegion for integrase B11145 sequence
ctgtcggcggtgcgggtggggcctggggggcagccgctgcgagctctgcagcgaacgatgtgaggcgtgactggagggcttcgcggagggtcacatgcagcgctctgatgcgcaaacggtagcgcaagcgcttgcgatcttgagcacccccaacccgatatctaacaatccgccgcagatatgcggcactaccgctaatgggcgcatctgcaggccatgatgcccaggcacacagaaccacgggccatggccgccaacga

SEQ ID NO: 37145 - DNA, 260 bp, Unknown
  Description of Unknown: RightRegion for integrase B11146 sequence
tggaaccgcattatagaccatatggagtttacctcgctagacgatatcgaggtgtttatataaaaagaaagccccgaaaatagggctttcataagtagtcataaaattagtgtattatgcttccaatgcctgtgtcatacacttataatacactaataaacgcaagcatcaattatacttaatatagcaaaaaggagtggcaatttctaccactccttcatctttcgcataacagcatcatataaccttggctgtagtac

SEQ ID NO: 37146 - DNA, 260 bp, Unknown
  Description of Unknown: RightRegion for integrase B11147 sequence
cggcggttcgacgccaccagactgagcatcgagctgctgcgcggcgttgaagttcgggagtgaaggccccaatgatcttcacagggctttccacagtcgctccgcagtcttgcgtccgataccgggaacggtcatgagctcctcaacggtgacgccccagctcaccggcataccgagcgtgtcgatgatcgtttcggccgtcttgactccgaccccagggagaccctggaggaagtggatctgccagtcgcggtggccgg

SEQ ID NO: 37147 - DNA, 260 bp, Unknown
  Description of Unknown: RightRegion for integrase B11148 sequence
gtatataatgagcataaattggaaaccgtgattcaaacaacaaataaaggtcaaaaaacgtgattctttgtctgaataggttgttttattgcacttttcaccaatgattacaagtttacatgagtacactaaagtttttgcgcaggagcgcattttggatgtgggggtatatctttatatacccaaaataaaaaccgctctcagacgattctgtggcctctgagggcataaaagaaaaagacccctcccggttttgggaa

SEQ ID NO: 37148 - DNA, 260 bp, Unknown; identical to SEQ ID NO: 36169
  Description of Unknown: RightRegion for integrase B11149 sequence

SEQ ID NO: 37149 - DNA, 260 bp, Unknown
  Description of Unknown: RightRegion for integrase B11150 sequence
gaagaggctaagctggaggccagggatagggcgctagcatatcagaagggggttaagatttgagtgtagcacgggcagtaacagtaataccggccaaagtcagtttggtgtcgcatactgtgaaaaacctatcgaaaaaaaaggttgcggcctatgcgcgagtatcgaccgcaagtgaggagcagctttccagctatgaagctcaggttgattactatacaaggcatattaaggctaatccggattgggaattcgttgaa

SEQ ID NO: 37150 - DNA, 260 bp, Unknown
  Description of Unknown: RightRegion for integrase B11151 sequence
gaaaaagccaagctaaaggctagggaaagggcactagcacatcagaagggggttaagctttgagtgtagcacgagcggtaaaagtaataccggccaaagtcagcccaatatcacaggctgtcaataacataccgaaaaaaagggtagcggcttatgcgcgagtatcaactgatagtgaggagcaactttccagctacgaagctcaggtcgactattatacccggcacataaaatcaaatacagagtgggaattcattgaa

SEQ ID NO: 37151 - DNA, 260 bp, Unknown
  Description of Unknown: RightRegion for integrase B11152 sequence
gtgctgcgctcggtaacggtgaaccggggcggtagccagattcaagctcagccgcgtagctgaccagccgtgactggatcgcctcacgcagggtcatcgccatggcaccgcttgatctgagtcgagactagcagggtttgtaggtcgggactgagatcaggaggacatgacgttggcggtcaccacatactcggtgccctgcttcttgcgctcgcacatggccgtgccctggccgtagccgccaaagccgttcttggcgc

SEQ ID NO: 37152 - DNA, 260 bp, Unknown
  Description of Unknown: RightRegion for integrase B11153 sequence
cgcggaacggttgatacaatagagcttgacgcggacaacaccccgcttattattttccgctgaggtatatttagttacattgaacaacagacaagtgtaaatttgtatagtttgacaggcttttctttttcgtctgcaccgcatataattatcttacaagaggtgttgtattgccggatgcaagaccgattataaacaagtataaaacctgtttgtgaaagccaccggcatggcgagtagcaggcgggtttttatatttt

SEQ ID NO: 37153 - DNA, 260 bp, Unknown
  Description of Unknown: RightRegion for integrase B11154 sequence
caaacggtactccgggctatcacagtcaacgccgaccgttctatcagtctgactttctgctaacgttcaaatctggttaccttatctttctataacatcagacaagccgccataaagtaaccacaaaaaaagcccccgctttgggggccttttgttatttgtccagttgccaacttccaatcgttgtcgtttccgtgaaccttatttaaaataatttttgcaataaaaaaagccccagatttctctgaggccttaaaacg

SEQ ID NO: 37154 - DNA, 260 bp, Unknown
  Description of Unknown: RightRegion for integrase B11155 sequence
aagtctgtgatagataagattgatgttgatagggataggctaacagtagtgtttagaacctaataagtgctatttcacacttgacggtcgttcaatgtgacgaaacacttactaaactcaactccgtaagacaaaactcaactccgtaagacaaaactcaactccgtaagacaaaactcaactcagagttgacttatctcttgcaatactcagcgcatatcattctcccaaagcagttcataaaacctctcaaggatagc

SEQ ID NO: 37155 - DNA, 260 bp, Unknown; identical to SEQ ID NO: 36058
  Description of Unknown: RightRegion for integrase B11156 sequence

SEQ ID NO: 37156 - DNA, 61 bp, Unknown
  Description of Unknown: RightRegion for integrase B11157 sequence
gagtcggcggcgctacgggcgaaggccgagacggcggggagcacccgccccccggcgacgc

SEQ ID NO: 37157 - DNA, 260 bp, Unknown
  Description of Unknown: RightRegion for integrase B11158 sequence
actgagagtagcagcatattgccgcgtgtcaacagaccaagacgagcagctattaagctatgagaatcaagtaaaatattatacagagtatataaaaagtagggatgattatgaattcacaaatgtatatgcggatgaaggaatatccggtacctcaacaaaaaaacgtgataatttcctcctaatgatagccgactgtgatgctggtaaaattgactttatcatcacaaaatcaatctcccgatttgcaagaaatacga

SEQ ID NO: 37158 - DNA, 260 bp, Unknown
  Description of Unknown: RightRegion for integrase B11159 sequence
agggcattgcacataagaaaggatggtcgtacctataccttgactggtgttgaactcctgtagtttttagtatgataaaaagtttactgcgatggagaaactttgtacacatctaaaactattagtgctataatatctttagacatagtgttaacctctttcattgtcgtaacttttcagtttcatacaagcgatccaattaaaaaggcgggtgtttccaaaacggaaacacccactttttttatctgcctttcgtctcc

SEQ ID NO: 37159 - DNA, 260 bp, Unknown
  Description of Unknown: RightRegion for integrase B11160 sequence
atgcttggtgaagacggcagcattaccgtaaagtttttagaaggaacagaagttaatttataggccatagttaagagagtaaatactctagctatggctttttttattttaaattttttaatttgtaattgtatttaaataggtagaagtgttataataaagaaaacgctttagtaagttgaggttttatggatttctatactttgtcagagcatattctgggctatacaaacagttttggagaagtcgagcttggaaaa

SEQ ID NO: 37160 - DNA, 260 bp, Unknown
  Description of Unknown: RightRegion for integrase B11161 sequence
acacctgaaatgaaagaaagagcaagacaagctgaattgatgagaaaaggagcacacagatgaaagaaagaatagttcagataataccagccataaaagacccaaaaacaagaagattattagctgaaaacaaacgaagaaaggttgcagcttacgctcgtgtttcaactgacagcgaggaacaaaaaacgagttatgttgcccaaatagattattacactaactatattaattcccatgaagactgggatttcgtaaaa

SEQ ID NO: 37161 - DNA, 260 bp, Unknown; identical to SEQ ID NO: 36714
  Description of Unknown: RightRegion for integrase B11162 sequence

SEQ ID NO: 37162 - DNA, 260 bp, Unknown
  Description of Unknown: RightRegion for integrase B11163 sequence
gtgctggattcgctgcaggtaggtcgatctggggaagtccacgctcagccgcgtagctggtgagcctgctggccagggcttcgcggagggtcacggctgatcggtgctcatgctcaacattctgatccccaccccaccaccgcgtcaagatcagcactccaagcacggtctgcagcacatacgcagatcacagttgtgatcgggggcctgagggtcttaggctctggctaaggacatcactgctacccatgagcaacacc

SEQ ID NO: 37163 - DNA, 260 bp, Unknown; identical to SEQ ID NO: 36020
  Description of Unknown: RightRegion for integrase B11164 sequence

SEQ ID NO: 37164 - DNA, 260 bp, Unknown
  Description of Unknown: RightRegion for integrase B11165 sequence
gtgttgcagacagtggaggtaggtcgaactggggaagtccgcgctcttccgcgtgccttctgagcatacttaacaacgcttctctaagagtcactattactctcctgaaacgttgagcagtaccgtgcaaacagcggcccttcatgccgtacttcagggatgccatatccacaatggccacaccaatggatgcactggcggcacgtgcggccgccccagcgtggcagctctggaaacacttcaccgtgggattcaccacg

SEQ ID NO: 37165 - DNA, 260 bp, Unknown; identical to SEQ ID NO: 36207
  Description of Unknown: RightRegion for integrase B11166 sequence

SEQ ID NO: 37166 - DNA, 260 bp, Unknown; identical to SEQ ID NO: 35952
  Description of Unknown: RightRegion for integrase B11167 sequence

SEQ ID NO: 37167 - DNA, 260 bp, Unknown
  Description of Unknown: RightRegion for integrase B11168 sequence
ataaaggcaatctggtataataacgacggcgacaatctcacgctggagatcgaaacgctatagccggtaacatggcgaaaatatacttatgtttgcttcatgataccggggcaatatcggcgtatcttctccagcaattacacaattactgcaactactggagagaataggcaataaaagagccggggattattccccggcttctttcttttccgtctcgatcaacaggcgcaaggcccgcttgattattctttatccat

SEQ ID NO: 37168 - DNA, 260 bp, Unknown; identical to SEQ ID NO: 36074
  Description of Unknown: RightRegion for integrase B11169 sequence

SEQ ID NO: 37169 - DNA, 260 bp, Unknown
  Description of Unknown: RightRegion for integrase B11170 sequence
tacaaggaggtgagctacaatgccgccgcccaagagctgaacatcgtcaaatactctgcctgaacaccatgcgaaccacctctacagaagtcatcaagctggctctccgccgcaattccaagagccgcctcgtactcaccctaccggaaccgccatccctgaaaatgggcaaccgcccgacaaaacgagccattcgcatggccaacgccctcgtgctggagcagaagctacacgcgggggagttccgtagcttaacggac

SEQ ID NO: 37170 - DNA, 260 bp, Unknown; identical to SEQ ID NO: 36145
  Description of Unknown: RightRegion for integrase B11171 sequence

SEQ ID NO: 37171 - DNA, 260 bp, Unknown
  Description of Unknown: RightRegion for integrase B11172 sequence
catttagttgagcgcgttgtgattgagcgcagggaagtggtgaacgtggtgcttcgcctttaatgtgtctagttgcggccctcaacaacaattctttaagtgaggtgttactcatttgccagcccaactactaacaactgcaccctcagccttcattgtcacagcacctcgtagcagaggtgttgcagcatcctccatctcaccaattacaatgcccagcacctcatccccctgctcaggtaaacactcaacaagcactt

SEQ ID NO: 37172 - DNA, 260 bp, Unknown; identical to SEQ ID NO: 36069
  Description of Unknown: RightRegion for integrase B11173 sequence

SEQ ID NO: 37173 - DNA, 260 bp, Unknown
  Description of Unknown: RightRegion for integrase B11174 sequence
agcgtggtagaccacatcaccgctgacgacctcggccacatcgaggtatatttttacccataactgttactattttatcgttgccacatgcctgcgaataaatagtagtagaaaaggggccggtttcccggtccccttttctgctgttctcacatcttctccagcttggccatcagtttccgccgctcgctttccggcatttcccgaacatccatcaggatatcctcgatgccttcgtgcccggagtagccgccctcgcg

SEQ ID NO: 37174 - DNA, 260 bp, Unknown
  Description of Unknown: RightRegion for integrase B11175 sequence
cgtaataaaacaagtgatatcttacaatatgtacaaaccaacatttttcagaatcagagttgacagaacattttgcggtgcaaaagttggcaaaataagtcagataatactattaatcaaaacattttttcaatgattactcgtttacactattacactaaagattttgcgcatgggagcgtttctgagccgtgccatatacttacataggtttcgcaaaacgctcccacaaacgattctacggccttacagggcataaa

SEQ ID NO: 37175 - DNA, 260 bp, Unknown
  Description of Unknown: RightRegion for integrase B11176 sequence
acgcgctttatccggagaattgacgcagatgacgacggcgcgttttttgtaacgccccgttaggcatatttgaccttggtattcccaaaggtaaattatgcccaaaagaatccccccgtcgtaagacgggggggtgttctcatttttcgagcttccgcatcacgctgttgtacacgcgctcgtttacgattttcaagctgtccatcagctcgtccatgatctcccacgccttgtccggtgaaacatctgccactgcgcgc

SEQ ID NO: 37176 - DNA, 260 bp, Unknown
  Description of Unknown: RightRegion for integrase B11177 sequence
atagaagtggacaatgaagcaagaaaggtcagcaagatagtctatcttagccgttacaaatgattctatgtaaaaaaaatattcatataaaaaggtggaaatgacttccacctatgcgtatgacagaaggaatgaaagcatgattcctaccatgaatgatgcctcagttgccaattgcgccgctgtatgacgagatttgatatttttatactttctattcctctgtttttccatttgctttatgtgtctccgattgaaaa

SEQ ID NO: 37177 - DNA, 260 bp, Unknown; identical to SEQ ID NO: 37157
  Description of Unknown: RightRegion for integrase B11178 sequence

SEQ ID NO: 37178 - DNA, 61 bp, Unknown
  Description of Unknown: RightRegion for integrase B11179 sequence
gaagaaatactaaactctgattacattaacatttataacaatcttacgagagaaaacaaaa

SEQ ID NO: 37179 - DNA, 260 bp, Unknown
  Description of Unknown: RightRegion for integrase B11180 sequence
gcgctggtggagcaggtggttgtggacagccaggcagtggcgagcgtggttcttcgcctttgaggtaacgatctgcggcaatttgcagcagtgcgctgacgggatcatcactcacttgccaccccagctgtcatatacacccccctcagccttcatagtcaccaattctccaacgaacggaactgccgcgtcctgcatctcgccgagcactatgcccagcacctcctcagcaatgtctgtaggtgattcgcacagtacct

SEQ ID NO: 37180 - DNA, 260 bp, Unknown
  Description of Unknown: RightRegion for integrase B11181 sequence
actataatagataaaattgttatagtcaatggaaatatcgaaatacagttaaagaatttttagcacttactatatgcagttcctatgacataatgttagtgctaatgccgtatttatcacgttttacaattatataattttagtgctgtcgcttatatgtcgtacatatgtctatcatatgtcgctttaagcgtctttttttatgccaaaatataatcagaaagagaggtaatgcgaatgttttctgatgaagttagaga

SEQ ID NO: 37181 - DNA, 222 bp, Unknown
  Description of Unknown: RightRegion for integrase B11182 sequence
gaaatgaaagcaaaagctaaagaaagagaattagaaaggatgagacaattatggcaaaagtaacaataataccatcaacgcttaatccactaacacaagcacctattacatcaaaacaaaaaagaagggtatgtgcttacgctcgtgtttcaacggatagcgatgaacaatacacaagttatgaagcacaagtaacttattataaaaaatatattcaagaac

SEQ ID NO: 37182 - DNA, 260 bp, Unknown; identical to SEQ ID NO: 36121
  Description of Unknown: RightRegion for integrase B11183 sequence

SEQ ID NO: 37183 - DNA, 260 bp, Unknown
  Description of Unknown: RightRegion for integrase B11184 sequence
gatcagagtagccgcttattgtcgagtgtctacagaccaagacgaacagctatcaagttatgagaatcaggtcaattattaccgtgaatacatcttaaaacatgaagattatgagttagtagacatctatgcagatgaaggcatttcagcaactaatacaaaaaaacgtgatgcttttaaccgactaatacaagattgtagagatggtaaggtggatagaattttagttaaatctattagtagatttgccagaaatacat

SEQ ID NO: 37184 - DNA, 260 bp, Unknown; identical to SEQ ID NO: 37183
  Description of Unknown: RightRegion for integrase B11185 sequence

SEQ ID NO: 37185 - DNA, 60 bp, Unknown
  Description of Unknown: RightRegion for integrase B11186 sequence
ccagctccaaactacagctatcttgaagaactattggatacagatttccggaccatgtat

SEQ ID NO: 37186 - DNA, 260 bp, Unknown
  Description of Unknown: RightRegion for integrase B11187 sequence
gaaagctggacaccggagatgcgacaggctgccgcagaaaggagcagaaaatgccaaaagtaaccgtcattccgccgtctatcaatcggacaactcggcagtccacaaccactccaactcgccgaaaagtcgctgcttacgccagagtttccacggatttcgaggaacagctcaccagctatgaggcacagatttcttactataccaattacattcaaagaaatccggattgggaatttgttaaaatatatacagatgaa

SEQ ID NO: 37187 - DNA, 260 bp, Unknown
  Description of Unknown: RightRegion for integrase B11188 sequence
gtgaaagaggtactgattgatatgagccagagggccccgatcgctgtggagtttcgtttttgaggccagccaggtaggcccggtctatagcgaggatggcctcttctagcgtcatcgtcatttcctggccctcacgtctaggtcttctgctgtgctccacagtccggcctcatcagtcaccagaaagccgtcagaagaccacctaaggccatgcccggtgcagacagttgagccatcaaagagttttcggccagcctcca

SEQ ID NO: 37188 - DNA, 260 bp, Unknown; identical to SEQ ID NO: 35549
  Description of Unknown: RightRegion for integrase B11189 sequence

SEQ ID NO: 37189 - DNA, 260 bp, Unknown
  Description of Unknown: RightRegion for integrase B11190 sequence
ttcgacaaggaccgggtgctgctccgctggcgcaccgccgaaccctctcaggaggctgcatgaccactaagaaatgtgggacatgcggagccgataagccgttgagcgagttcgattcagcgctcaatggaaatgggtacagatcactgcgcaagcactgtcgaccctgcatgaggattagggaccgccgccgattcgagaggacacaaatgctacgggaacaatcacgattgccattgcccacctatgacgacctggcg

SEQ ID NO: 37190 - DNA, 59 bp, Unknown
  Description of Unknown: RightRegion for integrase B11191 sequence
gaatttgataataaactaattgcattagaaagcaaaataagtatgatagttgacaaatt

SEQ ID NO: 37191 - DNA, 260 bp, Unknown
  Description of Unknown: RightRegion for integrase B11192 sequence
aatcagagtagccgcttattgtcgagtgtctacagatcaagacgagcagctatcaagttatgagaatcaggtcaattattaccgtgaatacatcttaaaacatgaagattatgagttagtagacatctatgcagatgaaggcatttcagcaactaatacaaaaaaacgtgatgcttttaaccgactaatacaagattgtagagatggtaaggtggatagaattttagttaaatctattagtagatttgccagaaatacat

SEQ ID NO: 37192 - DNA, 260 bp, Unknown; identical to SEQ ID NO: 35583
  Description of Unknown: RightRegion for integrase B11193 sequence

SEQ ID NO: 37193 - DNA, 260 bp, Unknown
  Description of Unknown: RightRegion for integrase B11194 sequence
ttatatacaaacggtaatatatcatgtgatattttgcgttatgtacataatgggataaattaaaagagtgcggtttccgcaatatttccatctacaaaacggggcgtttctgtccaaagcataatattaatcaaacttttccagcatgattactggtttacttgaccgtattaaagtttttgcgcaggagagcgttttcgataggggggtatataattaccctacccactttaaaatcgcccacaacgcgccacagggcc

SEQ ID NO: 37194 - DNA, 260 bp, Unknown; identical to SEQ ID NO: 36083
  Description of Unknown: RightRegion for integrase B11195 sequence

SEQ ID NO: 37195 - DNA, 260 bp, Unknown
  Description of Unknown: RightRegion for integrase B11196 sequence
gagcttctcgaacaatgcgtgttggagccatctggagagataaccgtggtgcttcgcctttaagcttccgctccagggcggacgctaacaactgcttaagacgactttcgctggggtggggagggccttccactatttctccccccaatctttaacaactccgccgtctgcaataagttttacagtctcgcccagaattggtacaccagcctcggccatttcgcaaagcacaattgataaaacctcatctgattgaattt

SEQ ID NO: 37196 - DNA, 260 bp, Unknown
  Description of Unknown: RightRegion for integrase B11197 sequence
ttatatacaaatggtaatataacatccgacattttaccttatgtatataaacggcttatttagaaaagcgtgattatcgtaacatttttggcatgaaaagcgtgataaaatcacggaaaatactattaatcaaaacaatttttccgtgattactcgtttacttgaacgtactaaagtttttgcgtagaagagcgttttcgataggggggcatataattaccctacccgccttaaaattgctcagaacgcattctacggcg

SEQ ID NO: 37197 - DNA, 260 bp, Unknown
  Description of Unknown: RightRegion for integrase B11198 sequence
aataagagtggcagcctattgtcgggtgtccaccgaccaagacgaacagctatcaagctatgagaaccaagtatcttactatcgtgattacatcttaaaacatgaagattatgagcttgtggacatctatgcggacgaaggcatttctgcaaccaataccaaaaaacgagaagcctttaaccgactgatacaggattgtagagcaggtaaggtggataggattttagttaagtccattagtcgttttgccagaaacacct

SEQ ID NO: 37198 - DNA, 61 bp, Unknown
  Description of Unknown: RightRegion for integrase B11199 sequence
tccgagcaggccacgcgcctcaagggccgcgcccgggagctggtcgaggcccagctcgtcg

SEQ ID NO: 37199 - DNA, 260 bp, Unknown
  Description of Unknown: RightRegion for integrase B11200 sequence
cagaccgtgatcgagattctgattgccagacaggctccgacggccattcgcctgaagctctgaaggcctcataccgctcgctgatggcgcgaaccacgctgccgagatcctgcacgtcgcgcctcctgtcgttgcacgcctggatggcgtagctgctccgtccatgtttgcacgccctcgacccactgttgcggctgcggatgtggatgcgacaatggcagctgtcctgctgcgaaatgctcacccatgagcgacgtgcc

SEQ ID NO: 37200 - DNA, 260 bp, Unknown
  Description of Unknown: RightRegion for integrase B11201 sequence
agccgtattttgaaacgaattgagattgacagcaacagagatatttttttggtcttcggttaaccttaatggaattaacccgatggatagtatcattaaggttatcaaaaaagaggaagatgatttctccctcatttttcatctgcacatgcagctatttttcgattagtttcatccaactccctctgtaactgaatgttgcgctcttgaagcttaagcacagcttcgattgcattatggaacacttcatcattactcag

SEQ ID NO: 37201 - DNA, 260 bp, Unknown
  Description of Unknown: RightRegion for integrase B11202 sequence
attaaagatggcagcgtactgccgagtgtcaaccgaccaagaagaacagttattaagctatgagaatcaggtcaattattacacaaattacatcagcgagaatccactctatgaatatgcagggacttatgcggatgaaggaatttcgggaaccaataccaaaaagagggatgaattcaaccgcatgattgctgattgcagggcggggaaaatagacatgattattactaagtccatttcccgatttgcaagaaatacgc

SEQ ID NO: 37202 - DNA, 260 bp, Unknown
  Description of Unknown: RightRegion for integrase B11203 sequence
gctgtcgttcggcggattgttgttgccaaacaggaacctgtggccattgacctgattctgtagccgcgtcgtacttggccaccatgctggcgatgatttctgcgacggtcatgctgcatcccccgggtgccgctccatccactccgccaccatcggcctgagctcctgcagctcgcgatagatgtagcgatcttccggatcgccgtagtccagctccagcgcatggtccacggccatggtggacaggtccagcagccgct

SEQ ID NO: 37203 - DNA, 260 bp, Unknown
  Description of Unknown: RightRegion for integrase B11204 sequence
caggtcgtggagtgcatcgagataaccaagcaggagccgagcggtctgcgcctgaagcgatagcggcgtcgtagcgagccgtgttctcgatgatgaggcgggagagcatggcgagcggaacccgagccagtgtaagccgtggctggcgttccgcaagagatcatcctaggcaagctggacttggcacacgttttgcaccccagcacaggcttttagggtgatcgcaactgaagacggcggatgacgccagaacactggga

SEQ ID NO: 37204 - DNA, 260 bp, Unknown
  Description of Unknown: RightRegion for integrase B11205 sequence
caggtcgtggagtgcatcgagataaccaagcaggagccgagcggcctgcgcctgaggcgatagcggcgtcgtagcgagccgtgttctcaaggatgaggcgagagagcatggcgaccggaacccgcgccagtgtacgccctgtattgcatagcgcaagaggcaatcttaggaaagccacgccaggcgttcgttttgcgccccagggctgactcctaacgttggtgcaaccgaagacggcggatgacgccagaacactggga

SEQ ID NO: 37205 - DNA, 260 bp, Unknown; identical to SEQ ID NO: 37204
  Description of Unknown: RightRegion for integrase B11206 sequence

SEQ ID NO: 37206 - DNA, 260 bp, Unknown
  Description of Unknown: RightRegion for integrase B11207 sequence
gggcgaattttgaaacgtatcgagatagatcacgacggaaatatttttttaattccaaattaaccttattttcacttaccattcggttactcacaataaggtaacaagaaaccccctgccgaaacagggggcattttttattcctgcgtgtctttcggaacaacgataatgtcgttctctttatggtaggcaatgttgctgatgccaagaattgcaccaaggaacatacatacggctgcgcttgtcttagccacttcctc

SEQ ID NO: 37207 - DNA, 59 bp, Unknown
  Description of Unknown: RightRegion for integrase B11208 sequence
aaagaccgatcaagaagtgaatcatggacatctgaaatgagagaaaaagcaagactaaa

SEQ ID NO: 37208 - DNA, 260 bp, Unknown
  Description of Unknown: RightRegion for integrase B11209 sequence
gatcagagtagccgcttattgtcgagtgtctacagaccaagacgaacagctatcaagttatgagaatcaggttaattattaccgtgaatacatcttaaaacatgaagattatgagttagtagacatctatgcagatgaaggaatctccgcaactaatacaaaaaaacgtgatgctttcaaccgactaatacaagattgtagagatggtaaggtggatagaattttagttaaatctattagtagatttgccagaaatacat

SEQ ID NO: 37209 - DNA, 260 bp, Unknown; identical to SEQ ID NO: 36037
  Description of Unknown: RightRegion for integrase B11210 sequence

SEQ ID NO: 37210 - DNA, 260 bp, Unknown
  Description of Unknown: RightRegion for integrase B11211 sequence
cgctttgtggagcgggtggttgtaaccaagcaggaggttgagcaggtggtccttcgtttttgagatatcggttcgcaagctcaattagcagctcgtatccctcatccatgaccttccgattttctttaggtccaagaggtggcgtagacgatacacctccccgattagatcggccacctaaatgcagatattgcatatcagcgactgctagtccttttgtcgccgtccccgccacccctggcgctgccgcttcttcccgt

SEQ ID NO: 37211 - DNA, 260 bp, Unknown
  Description of Unknown: RightRegion for integrase B11212 sequence
cgcagtctgatatccgaagtgcgtgtaaaccttgaagggcaagcgtttcagataatgtactaactatacgccacagtcatgtggcatatgattagtacatgaatctgtgcagatgccttcaaaatacaaggtataatgtatcgaccacatcgcaaaaaatcgcttaaaacgcaaataaataggtcggtttctgtaccccttgcaattactgcgtttcaagccacgaaaaatggcacctcacgcctaaacgcaaggtgcca

SEQ ID NO: 37212 - DNA, 260 bp, Unknown
  Description of Unknown: RightRegion for integrase B11213 sequence
cgaaacataataaaagctgtgcgtgttgatgaagatgcacagcctatagaggtcatttactaatcgtcatttatatacaggtattaccaccatagtacattttctcctttcccatttggggatattatagcacaaaaaaagagcctaccaatcaaggtagactcttttaatgagaggacaccgactatcacggcaggttatgcccagacctgtgatggattccacaccgattcttaatccaacatcgcaacctcaagtgt

SEQ ID NO: 37213 - DNA, 59 bp, Unknown
  Description of Unknown: RightRegion for integrase B11214 sequence
ctcgaagatggtgtttacagtaaggaaaccttcctgcagcgtcaatccgcaatcagcca

SEQ ID NO: 37214 - DNA, 260 bp, Unknown
  Description of Unknown: RightRegion for integrase B11215 sequence
agcatcgttatcaatgacaatggagagcagttggacgtgaccctcaagaaaggactcgaataagatgaaacaagaatcaagacaagacacgatatcgctgaacacgctccggcgcaccagaaaggaacccgagccgcaggttcaggtggaactaccaaacattcatgcaaaatcagcgccgggtatggtggttccccaggcaaattgcgatttttccatccccatcatcttcgagcgcaatgaggagaatgttcgtattg

SEQ ID NO: 37215 - DNA, 260 bp, Unknown
  Description of Unknown: RightRegion for integrase B11216 sequence
gagttcgtggcttccatcgtgtggctgggcggcctggagagcctggagatcacgctgcgctagggcgcgggcgatgacttgacgaagggcggtgcgtgcgtccatcaggctgcgtaagcgggacagtggcgggcgaacaggccctttgatcggctggcttccgggtaacccaggccgcatttgtgaacccaatggacgcaggttgcgcagttcagggtccgttgccggttgcggtagttgcggttgtattcccgctgccg

SEQ ID NO: 37216 - DNA, 260 bp, Unknown
  Description of Unknown: RightRegion for integrase B11217 sequence
gccctcgtggggaagatcaccccggagggagaagggtatcatgtcgaccttgttttaccatgagtaattaaatccacctatttgtttcgttatggaaaaatgagggaaaacgtgaactccgtcttttcggaataatacgaagtgtaaagaacgcagaaaaacggtctttttcgtggtttcggaacgtttgaagcctgattacacgtttactctctttgactaaagatttttcgcccagtcgctttttatttcttcgccaa

SEQ ID NO: 37217 - DNA, 260 bp, Unknown
  Description of Unknown: RightRegion for integrase B11218 sequence
gaaagctggacggacgaaatgcggcaaaaggctgccgagcaaacaagaaagaggtatcaataatgggaaaagttacagttatacccgctacaagagattttcatacgggtgtggttaaaaatagcatttacagaaaacgagtggcggcttatgcgagagtttctaccgaccacgaagagcaacgcacatcctatgaggcacaggtggactattacaccaaatacatccaaggcagagccgattgggagttcgttagggtt

SEQ ID NO: 37218 - DNA, 61 bp, Unknown
  Description of Unknown: RightRegion for integrase B11219 sequence
ggcatcttcaacgccgctacaaagtcccgcatggatgaactggacgcgcagaaagccgccc

SEQ ID NO: 37219 - DNA, 260 bp, Unknown
  Description of Unknown: RightRegion for integrase B11220 sequence
gagttcgtcaacgaggtcgtctatgtcggggatcccgacacggtcgaagtccggctgcgctagggctcgagccgcgattctccgcagggcatctctggcgttcaaggcagcccaggcgtcgacggccactgtacgccgtgtcttgcgctttgcaagccttaatcctaggcgggctcgggagggaacggatcgcctggtgactgcacgctgattagcgttgcgccaactgaagagccgtgatggtgcccgaacactgggat

SEQ ID NO: 37220 - DNA, 260 bp, Unknown
  Description of Unknown: RightRegion for integrase B11221 sequence
gtgcgtgccctacgtgatcgagttccaacacagtcacttgtgcgaatcgccaagactaattagactgcgatccacactcccgcaagaggtagcaatagtgaagaacaaggaattcactctggacctgggtgagccggttcctgtcagcgagttgatcgctgttcctgcaacacgccagccttctccccgtgacctggctcttgatgatctggtcgcacgggtagcaactgacgacttcaaagacaaggccatcagttgga

SEQ ID NO: 37221 - DNA, 59 bp, Unknown
  Description of Unknown: RightRegion for integrase B11222 sequence
ggagttatcatgaatcaagttctcgaccgcatcagtatttcagaagctggacaaattgt

SEQ ID NO: 37222 - DNA, 260 bp, Unknown
  Description of Unknown: RightRegion for integrase B11223 sequence
cgttcaatcatcaaagagatcaaattttatcctgataggcatattgagattatttttttgtgataaattactgtggaacgggttagatcggtctcggtgttccttgttactaagtaaaaacatagcttaagccctgaaaatataggattccttgttttcagggcttttaaaaattcaacaaatattcagcttttcaggcatcaattttttgtgctacttcaacatggtacaacgtggcgcaatcgtccattgacggcagt

SEQ ID NO: 37223 - DNA, 260 bp, Unknown
  Description of Unknown: RightRegion for integrase B11224 sequence
caattcgtcagcgaacttgtctggcccggaggactggagagcctggagatcacgctgcgctaaggcgcgctctgcgatgcgctcaagcgcctcctgcccagtcatgcgcgacctgtcgtgcgttgctgcgcgaagtatgccacagctttctcttcgcaagctgcaatcctaggaagtcgggatcggtcgctcagatttcgccctgcatcgctctgcctacggtgaggtcacgacggaccatcgccgatgacgccggaaca

SEQ ID NO: 37224 - DNA, 260 bp, Unknown; identical to SEQ ID NO: 36098
  Description of Unknown: RightRegion for integrase B11225 sequence

SEQ ID NO: 37225 - DNA, 260 bp, Unknown
  Description of Unknown: RightRegion for integrase B11226 sequence
cgaagtctgatatcagaagtgcgtgtaacccttgaaggacaagcgtttcagataatgtactaactatacgccacagtcgtgaagcatactgttagtacatgaatcggtgcagatgccttcaaaatacaaggtataatgtatcgaccacattgcaaaaaatcgcttaaaacgtaaataaacggctcggtttctgtaccccttgcaattactgcgtttcaagacacgaaaaatggcacctcacgccaaaacgcaaggtgcca

SEQ ID NO: 37226 - DNA, 260 bp, Unknown
  Description of Unknown: RightRegion for integrase B11227 sequence
ctaattaaaaccatagaatttactaatgaatccaagcataaaccaaaagtgatttttttataggtttgtgtcactttattttactatagcctgagctatatttaattaaagggacataaaaaagagggccagcaccaaccgctgacccttttcttatttcttatatttcttgcaccatggcaggcacttatttccaaactttccattctgtgtggttccaatcagatcctgcagcttcttgactgccttgaccgtctcag

SEQ ID NO: 37227 - DNA, 260 bp, Unknown; identical to SEQ ID NO: 37183
  Description of Unknown: RightRegion for integrase B11228 sequence

SEQ ID NO: 37228 - DNA, 260 bp, Unknown; identical to SEQ ID NO: 37191
  Description of Unknown: RightRegion for integrase B11229 sequence

SEQ ID NO: 37229 - DNA, 260 bp, Unknown
  Description of Unknown: RightRegion for integrase B11230 sequence
aatcagagtagccgcttattgtcgagtgtctacagaccaagacgaacagctatcaagttatgagaatcaggttaattattaccgtgaatacatcttaaaacataaagattatgagttagtagacatctatgcagatgaagggatctccgcaactaatacaaaaaaacgtgatgcttttaaccgcctaatacaagattgtagaggtggtaaggtggatagaattttagttaaatctattagtagatttgccagaaatacat

SEQ ID NO: 37230 - DNA, 260 bp, Unknown; identical to SEQ ID NO: 37208
  Description of Unknown: RightRegion for integrase B11231 sequence

SEQ ID NO: 37231 - DNA, 260 bp, Unknown; identical to SEQ ID NO: 37183
  Description of Unknown: RightRegion for integrase B11232 sequence

SEQ ID NO: 37232 - DNA, 61 bp, Unknown
  Description of Unknown: RightRegion for integrase B11233 sequence
gatttagataaatttgatggagttatcatgaatcaagttctcgaccacatcagtatttcag

SEQ ID NO: 37233 - DNA, 260 bp, Unknown
  Description of Unknown: RightRegion for integrase B11234 sequence
cgaatcatcaaaaaagcaaccgtctcaaaggacggcattgattatacgctcagttatacataacgacataaacagcactgcttctgttgtttcgtaaaatgaacataaattaaaaatccgtttttgcaaaacattttcggcatcaaatcgttcacttatcgcaaatactacgcactttttataacattttgccgttgattacacggatacactattacactaaagattttgcgtgtgagagcgttttgaaacctcgccat

SEQ ID NO: 37234 - DNA, 260 bp, Unknown; identical to SEQ ID NO: 37197
  Description of Unknown: RightRegion for integrase B11235 sequence

SEQ ID NO: 37235 - DNA, 260 bp, Unknown
  Description of Unknown: RightRegion for integrase B11236 sequence
aataagagtggcagcctattgtcgggtgtccaccgaccaagacgaacagctatcaagctatgagaaccaagtatcttactatcgtgattacatcttaaaacatgaagattatgagcttgtggacatctatgcggacgaaggcatttctgcaaccaataccaaaaaacgagaagcttttaaccgactgatacaggattgtagagcaggtaaggtggataggattttagttaagtccattagtcgttttgccagaaacacct

SEQ ID NO: 37236 - DNA, 260 bp, Unknown
  Description of Unknown: RightRegion for integrase B11237 sequence
gcatcccccaaagcagaatatgaattatcggacgattgtccgtacacgagaaaggaagattgacatggcaagacaagtcgtacacattcccgcacagaggaatattgcaaacagggctgttgcccgtaacaccaaactccgagtggcagcctactgccgagtttccacggagcaggatgaacagctgaacagctttgaaaaccaggtgacctactacacagagttcatcaccagaaaccccaattatgaactggctggca

SEQ ID NO: 37237 - DNA, 59 bp, Unknown; identical to SEQ ID NO: 36264
  Description of Unknown: RightRegion for integrase B11238 sequence

SEQ ID NO: 37238 - DNA, 61 bp, Unknown; identical to SEQ ID NO: 37232
  Description of Unknown: RightRegion for integrase B11239 sequence

SEQ ID NO: 37239 - DNA, 60 bp, Unknown
  Description of Unknown: RightRegion for integrase B11240 sequence
ggagagcgactccttgacctcaattcccaaaaggctgacctacagaagcagatcagccgg

SEQ ID NO: 37240 - DNA, 59 bp, Unknown
  Description of Unknown: RightRegion for integrase B11241 sequence
acaacttttacgctgcctcggaagttgatgaagctagtttacacaaggcctgaactaag

SEQ ID NO: 37241 - DNA, 260 bp, Unknown; identical to SEQ ID NO: 36902
  Description of Unknown: RightRegion for integrase B11242 sequence

SEQ ID NO: 37242 - DNA, 60 bp, Unknown
  Description of Unknown: RightRegion for integrase B11243 sequence
aacggattagagcaagaaatagacacaaatactatggatataattaataaagaattagaa

SEQ ID NO: 37243 - DNA, 260 bp, Unknown
  Description of Unknown: RightRegion for integrase B11244 sequence
aatccgaatggcggcctactgccgagtatccaccgaccaagacgaacagctatcaagctatgagaaccaggttcggtattacaaagagtatattcagcagaatcctctctacgagttggttgatatttatgcggatgaggggatttcaggaaccaataccaagaaacgcacagagtttaataggttgatagctgactgccgaaaaggcaaagtggatagaatcattgtgaaatccatcagccgtttttccagaaacacgc

SEQ ID NO: 37244 - DNA, 260 bp, Unknown
  Description of Unknown: RightRegion for integrase B11245 sequence
aatccgaatggcggcctactgccgagtatccaccgaccaagacgaacagctatcaagctatgagaaccaggttcggtattataaagagtttattaggcagaatcctctctacgagttggttgatatttatgcggatgaggggatttcaggaactaataccaagaaacgcacagagtttaatcggttgatagctgactgccgaaaaggcaaagtggatagaatcattgtgaaatcgattagccgtttttccagaaacacgc

SEQ ID NO: 37245 - DNA, 260 bp, Unknown
  Description of Unknown: RightRegion for integrase B11246 sequence
aatccgaatggcggcctactgccgagtatccaccgaccaagacgaacagctatcaagctatgagaaccaggttcggtattacaaagagtatattcagcagaatcctctctacgagttggttgatatttatgcggatgaggggatttcaggaactaataccaagaaacgcacagagtttaatcggttgatagctgactgccggaaaggcaaagtagatagaatcattgtgaagtctatcagccgtttttctaggaacacgc

SEQ ID NO: 37246 - DNA, 260 bp, Unknown
  Description of Unknown: RightRegion for integrase B11247 sequence
agcaaattggtaaaaagaatcgtcattgacgataaaaaaatctcctttgagttgtatgcgtagtattacaactcgaaacaagaccgatgtctcatttgtttttgcaaaacaaaaaagggtcgccccgaagggcggcccttttacgattctatccgtatttcttttttcgtgcctttgagcgtcatgatgtgtcttgtgttcgccgcggggagaagcatcttcctcacggcataacctccgtatgacatccacgagctgac

SEQ ID NO: 37247 - DNA, 61 bp, Unknown
  Description of Unknown: RightRegion for integrase B11248 sequence
ctcgacccggacctggccagcacgcggggctcgattaaagaaaagtaccgggcggcgacgg

SEQ ID NO: 37248 - DNA, 260 bp, Unknown
  Description of Unknown: RightRegion for integrase B11249 sequence
aatccgaatggcggcctattgccgagtgtccaccgaccaagacgaacagctatcaagttatgagaaccaggttcggtattatcaagactatattcgccagaatcctctctaccagttggttgatatatacgcggatgaggggatttcaggaaccaataccaagaaacgaacagggtttaatcggttgatagcagactgccgaaaaggtaaagtggatagaattatagtgaagtctatcagccgtttttccagaaacacgc

SEQ ID NO: 37249 - DNA, 260 bp, Unknown
  Description of Unknown: RightRegion for integrase B11250 sequence
acgttgataaaatccatcacacccaccgaagagggcttcgattttgccctaaattatacataaagtaatatgactgatgtaatcttgccttttgtataaatgggcataaatcggaaatcgtgaattagggaacattttaagggggtaaaagtgtgtattttcaccagaagttacacctttactgcatttcgtggagatgattacacgtttacactcatgaactaaagaaatcgcgttttattcttcagacgtatatttac

SEQ ID NO: 37250 - DNA, 260 bp, Unknown
  Description of Unknown: RightRegion for integrase B11251 sequence
acggcgaagcaggcgaggaagctcctgcggcaggcggcacgccagcaggagcagaagggctgaggggttcagcggctactgtttatgggcgtctcctacggagcagccgccgctcagcggcacgcggcgacgagcctgtagccctgcagctcgccccgctccttcaactgccgcagaatttcgagggctttgcggtcgtaaacgacgagcgtcctgcccttcttccgcacctgagctttcgagaacgtccaagcgtaagg

SEQ ID NO: 37251 - DNA, 260 bp, Unknown; identical to SEQ ID NO: 36902
  Description of Unknown: RightRegion for integrase B11252 sequence

SEQ ID NO: 37252 - DNA, 260 bp, Unknown
  Description of Unknown: RightRegion for integrase B11253 sequence
atgaccggtccttcatcctctctgccatctccggtatggaatccgagcgtgacaagctcttaaagcaaatcgaccgcctccatgacctggttgagcagggcgtctacaccatcgaacagtataacgaacgctacgtcaaactccacctgcgcctccaggaagtcaacgcctccctggccaccgagcagcagcgcctttcctccctccccgcctactgcacaaaagcagagctggccccggccatcatccgtctgcttgac

SEQ ID NO: 37253 - DNA, 260 bp, Unknown; identical to SEQ ID NO: 36210
  Description of Unknown: RightRegion for integrase B11254 sequence

SEQ ID NO: 37254 - DNA, 60 bp, Unknown
  Description of Unknown: RightRegion for integrase B11255 sequence
gatgtgcgccgaaaaatcaacaatatcattgaatccattgaaaacggtactgccagctct

SEQ ID NO: 37255 - DNA, 260 bp, Unknown
  Description of Unknown: RightRegion for integrase B11256 sequence
gaagctaaagcgacctatagaaatggagaagaaaaacacgtcatcattcagaaaggacggtagacatgaaaaaagttatcacgatagaaccagccaaacaagtcacccataaggttgacctgcccagctttaccaaacgacgagtggcaggctatgccagggtatccactgaccatgaagatcagacaacttcctacgaagctcagatgacatactacacagactacatcaacagtcgctcagattgggaatttgtcaag

SEQ ID NO: 37256 - DNA, 62 bp, Unknown; identical to SEQ ID NO: 36434
  Description of Unknown: RightRegion for integrase B11257 sequence

SEQ ID NO: 37257 - DNA, 260 bp, Unknown; identical to SEQ ID NO: 35981
  Description of Unknown: RightRegion for integrase B11258 sequence

SEQ ID NO: 37258 - DNA, 260 bp, Unknown
  Description of Unknown: RightRegion for integrase C1 sequence
cttgtttaccaggtcgatcccgtaacttcttcatcacatagcggacgaggtgcagtatgagcctaagcccttgtcgcgtggccgccgtggccgggctggcaggattgtggtgccatagtgccgggccatatcctggtacgtacggttgaggccgggatcatagcggtctgggttggtcacagccgccttgagattgtcgcagaccgtgatggtcgccactccgccgaaggcggcgaacatgccgacatggcagccgatcc

SEQ ID NO: 37259 - DNA, 260 bp, Unknown
  Description of Unknown: RightRegion for integrase C2 sequence
gagcccgttccgccgtgcgccattggagcaggccgacacagaggagagcagtatggataacgatctagcagcgtatggaacagcagctggccgccattctgggagaacggcaggtagccaagctcgtccagcaccaccagatcgacgcgggtcagctggtcggcgagcttgccggcctgaccggcccgagcctcgccctccagccggttcaccaggtcgatgacgttgaagaaccgggcgcgcgcgccgcggcgtacgca

SEQ ID NO: 37260 - DNA, 260 bp, Unknown
  Description of Unknown: RightRegion for integrase C3 sequence
aaaggcctatggatcaagacgatagaccaaaatcccagcctcttcgaacagataccgtgaaccagggggtattatgacaatggatccaacgtgtcgtcgatgtcgagcacaatccgcttcggcacctgccggaaggaggcgcagtaaaggtcgatcatcgctcgccccatggcgaccagctcccgcacgccgggcaggttctccagcctgcacatcgtcgactgggaggccagatcccgacccgacggcagcgcatcctg

SEQ ID NO: 37261 - DNA, 260 bp, Unknown; identical to SEQ ID NO: 37260
  Description of Unknown: RightRegion for integrase C4 sequence

SEQ ID NO: 37262 - DNA, 260 bp, Unknown
  Description of Unknown: RightRegion for integrase C5 sequence
aaaggtttatggatcaagaccatagatcacgatcccaccctcttcgaacacacttcatgaaccagggggcattatgacaatggatccaagcagcccttgatgtctccctcgatgacccacggatatggcatcccgtgcctccgggtatccccgccgcgtttatgcgactgagcagcccgtcggatatgctccaaggcgccgtgcgtgctccgtccgggcctgaacccataggaaacatgccagaactgcgcctcgaagat

SEQ ID NO: 37263 - DNA, 260 bp, Unknown
  Description of Unknown: RightRegion for integrase C6 sequence
aaaggcctatggatcaagacgatagacaaaaatcccagcctcttcgaacagataccgtgaaccagggggtattatgacaatggatccaaggtgtcgtcaatgtcgagtacgatccgcttcggcacctgccggaacgaggcgcaatagagatcgaccatcgcccgccccatcgcaaccagctcccgcacgccgggcaggttctccagccggcacagcgtcgattgcgacgccagatcccgacccgacggcagcgcatcctg

SEQ ID NO: 37264 - DNA, 260 bp, Unknown
  Description of Unknown: RightRegion for integrase C7 sequence
cagtgggagtggcgcctgaagatcgccccccaatcaagccaatccggcttgagccgttgacggaaaccggtaggaaggagagcagtatggataacgcttcccgacgctaccgacggagggctcgacaccggcgtcggtcaggcgctcggtatacttgatggcaacgtattgcgagccgcggtcggagtgatggatgaggccgctgccctttgccggtcggcggtcgtggagcgcttgctccaaggcgtccagcacaaaat

SEQ ID NO: 37265 - DNA, 260 bp, Unknown
  Description of Unknown: RightRegion for integrase C8 sequence
gagatcctcaggcaacgctggcaaggggaaacacccagcattgcttgtcctcctgactagacggtttgaccggtataaactcaaatttttgactggagaagacccatggcaaagcacacaccttcgattccaccacctcagcatccgcctgaagatgactatgggggtattgaggctggagtatctcaatgcgccagcgtagtcggtagtcggcgagggccgtctgaggggcgtggtgggtggcgagaatcaggagttcg

SEQ ID NO: 37266 - DNA, 260 bp, Unknown
  Description of Unknown: RightRegion for integrase C9 sequence
tatcgacaaatgcaaaccgagccaagaacatcaactggcgaggaaagaggtgtagtatgaacgccgatcgttgtagaacaggcaggcaccctggccgtcatgccagatcaccttaatcagcccgccttggcgaccgcggaaacagaataaatgaccgctgtgcggatctcgcttcaacgtctcctgcaccatcaatgccagacctggaaagcccttgcgcatatccgtgtagccgctggcaagccacaccttcacgccgc

SEQ ID NO: 37267 - DNA, 260 bp, Unknown
  Description of Unknown: RightRegion for integrase C10 sequence
atcgatcaacttcaacgccgactgcaacggaccaggcgatcaaggaaaggtgcatcatgaagcattcgcggatcccacctacgccgatgccatcctcgaccgcctcgttcacaacgctcaccggctcgaactcaacggcgaatccatgcgcagatccatcatctccgctgccgcttgaccgaaccgcaaatgcagtgacatcttccccgacgatcaggtgctccacctgcgcgcgatcagatcggaacgctgcgcggcat

SEQ ID NO: 37268 - DNA, 260 bp, Unknown
  Description of Unknown: RightRegion for integrase C11 sequence
atcgatcaacttcaacgccgactgcaacggaccaggcgatcaaggaaaggtgcatcatgaagcattcgcggacaaagccatgacgttggccgccatcgacagactggttcatcacgcgacgatcttcgaaatgaatgtcgagagctacaggcgcaaaaccgcaatatcccgtttgacggaaaacagcgatggcacgccggcaacgctggcctcggccctcgctgattgacgcgccgcgacaaacaaacgtcagcatagat

SEQ ID NO: 37269 - DNA, 260 bp, Unknown
  Description of Unknown: RightRegion for integrase C12 sequence
cggccacagatttatgaatattatcaatatgataaggttgtccgattgcccggactctaacagagggaagcattatgaaacgcgctggcgcgaccggatgaaactcttgttctttgaccggtccggcttcgtgctggttctaaagcggctgaccgaggacaagttccggtggccgcgccgggagacggcggtggttacgctgacgaccgagcagctccattggattctcgacggcatcgacatcgacgcaatggtgcgcc

SEQ ID NO: 37270 - DNA, 260 bp, Unknown
  Description of Unknown: RightRegion for integrase C13 sequence
tatggtggccgtcaacccagattaattgtcgctcaacgactccaacaaggtgcatcgtgatgtctgctccttgtcccgcgggcgtcgcggccgcgtcggcaagacggcgctgccataatgggccgccatcccgcaatacgtccggttgacctggggatcgaagtggcaggccttgatgatcgctaccttggcattgtcgggaaccagcaaggctggcgcaccgccaaagtactccagcgccaggatatggcattcaatcc

SEQ ID NO: 37271 - DNA, 260 bp, Unknown
  Description of Unknown: RightRegion for integrase C14 sequence
cgcaaagctacacaaccaaccttcatcgccgctccaactaccgaacaaggtgcaatgtgaaacctactccttatcctgcgggcgataaacgcgtgcaggcagaaatgaggtgccgtagtgacgcgcgaagtccagcacggtgtcgcccgcgcgcggctcgtaacggtcggggtcggcgatcatcgcgcgcgggttgtccggcacgatcagttgtggaacgccgccgtagaaggtcagcgcgcgggtgataccactcagcc

SEQ ID NO: 37272 - DNA, 260 bp, Unknown
  Description of Unknown: RightRegion for integrase C15 sequence
gccgttcccgcccgccgtgcctcaattaccgtgccatcaaccgaacaggactcattatgaaaccttcgccttatccttcggccgcttcggtcgcgccggcagaacgccgacaccgtagtgggaagccatcatgccgaagctacggttgatctccggatcgtaaaagcttgcgcggttcacaccggacttcagattgtcgggaacaatcaggcgcgggacgccgccaaaaaagcggaacaagcgcacatgcgagccaatcc

SEQ ID NO: 37273 - DNA, 260 bp, Unknown
  Description of Unknown: RightRegion for integrase C16 sequence
aacgatgccgaaggacaaatccctatgtttatcgaggtttcggaaggaggtgcacaatgaacgccccattgcgaacggcctgatgtcgcgctcgatgacattgttatcaacgggggatcgcccgtcgtctacgtagcggatcaggtactgccattgcctgcgacagtagccgaccgcctcgccgaacagactcttcggcaagaccttcggcgccagctcgtcaagccatgccttgaaggcgctcagcaatggcacgctgt

SEQ ID NO: 37274 - DNA, 260 bp, Unknown
  Description of Unknown: RightRegion for integrase C17 sequence
cgggactgggtgcgcacttcagggcatcttcgggggcaacattcccacactcaactgtgagaggtgcattatgagatcaccgtcggtatgccgagattgcggaactcccccggtttgccgactttcgggatcgagacctgccggaccggttgcggctgataggtccgcgcacgcagttctgcctgcagacggtccagatgctggtccgcctgttcggcaaagtctgccacgctgattccatcgacaccgccactgccccg

SEQ ID NO: 37275 - DNA, 260 bp, Unknown
  Description of Unknown: RightRegion for integrase C18 sequence
cgtcgtctgagacggccgccgtccagcaatcctcggcaaaaaacccttgaacttcaatgacatggaaaggtgagcattatgaagcaggctcggtttggcctgtcagaatcaagttctcgtttgccttcagccatgctccttgcgctagggataagacgttgcggcgatcaagaccgcggtgggtgctgaagtcgatgtcttcgatcgaagcattggcaaaccgcagctttgccgttgccagtcgattggtcagccgcttg

SEQ ID NO: 37276 - DNA, 260 bp, Unknown
  Description of Unknown: RightRegion for integrase C19 sequence
aaggcgcgcccgtgtcgcatcgccgacgcggagacgcttccaatgtttacagatacttaaagaaggagtgcgcgatgactcaggcccgccaattggacgcagggcccgctcggcggcgttgttatccatggcgacacgaccgtcttcgacgaataggcagaacgaggaccaacggctcaggccatatcggaaagcttgagccagatcgcccttgcccggaatacgggccagttgcgcttcagcccagacgcggaatgctt

SEQ ID NO: 37277 - DNA, 260 bp, Unknown
  Description of Unknown: RightRegion for integrase C20 sequence
aaggcgcgcccgtgtcgcatcgccgacgcggagacgcttccaatgtttacagatacttaaagaaggagtgcgcaatgactcaggcccgccaatggggcgcagggcccgttcggcggcgttgttatccatggcgacgcgaccgtcttcgaggaataggcagaatgagtgccagcggctcaggccgtaacggaaggcgctcgccagatcgcccttgcccggaatacgggtcagttgcgcttcagcccagacgcgcaaggctt

SEQ ID NO: 37278 - DNA, 260 bp, Unknown
  Description of Unknown: RightRegion for integrase C21 sequence
ccacgtctcaacgggccgtcatcatcaaatccggagcaaaagacctttgtctttcagtaacgtagcgagatgggcattatgacgtgggaccagggccgctgatcgtaaccgcgcttgaggcgatggctccaccagcagagacgttccgctctgggcgcgatttcgcagcctggatcgggctgacgccgatccagcgttcgaccggcggcaaggagcgcctcggacgaacgtcgcggatgggagagcgaacgctgcgacgc

SEQ ID NO: 37279 - DNA, 260 bp, Unknown
  Description of Unknown: RightRegion for integrase C22 sequence
aagggcagcccgtgtcgcatcgccgacgcggagacgcttccaatgtttacagacacttaaagaaggagtgcataatgactcaggtctggcaagtggacgcatggctcgttcagctatgttgttatcgatttcgacacggccatcgtcgatgtaaacgctcaacgctgcccatcgagagagggcatatcgcattgcctcggccagcttctgcttctgcggcaacgtcgaaagcgtgtcttcgatccagaccttcagttctt

SEQ ID NO: 37280 - DNA, 260 bp, Unknown
  Description of Unknown: RightRegion for integrase C23 sequence
aggagcggacacagtccattatcacaatcacaggatcagcagatccagctttttcaataacatagcgaggtgtgcattatgtcgtgggatcggtcgggccgaacagaagcaggttcgcgcccttctcaagccagctgtcgccggcggtgatggccatcacctgggccttggagatcattggaacggcttcgaactcgaacgtgtcgagggtcttgcccggcaggaggcgcgcctcggcgaggtgcctttcgatgcgtcgc

SEQ ID NO: 37281 - DNA, 260 bp, Unknown
  Description of Unknown: RightRegion for integrase C24 sequence
cctcgccaccccgcgggatcgcctccagatcaggaaaatctattcctttcgatgacataggaagatgggagttatgaaacaggattgtaatcgctgcaccagtttgaaagcgctgaccgagcatacgccagtgacgagaagagcgtttcattcaggaactcgtctcgcagccgcccattgaagctttcgatgaaggcgttctggatcggcttgccgggcgcgatgtagtgccattccaccttggtccgatccgtccattg

SEQ ID NO: 37282 - DNA, 260 bp, Unknown
  Description of Unknown: RightRegion for integrase C25 sequence
ccgaggcaccccataggatcgcctccaaatcaggaaagcttattctcttcaataacatagaaagatgggcgttatgaaacaggattgtaatcgtccgcccattccgcaatggcgctgcgggcatggtcgaggccgaagaacaggctttcattgagcagctcgtcgcgcatgcggccgttgaaactctcgacatagccgttctgcattggccttccctgtgcaatgtagtgccactcgaccttgtgatcttttgaccaggc

SEQ ID NO: 37283 - DNA, 260 bp, Unknown
  Description of Unknown: RightRegion for integrase C26 sequence
ccgaggcaccccataggatcgcctccaaatcaggaaagcttattctcttcaataacatagaaagatgggcgttatgaaacaggattgtaatcgtccgcccattccgcaatggcgctgcgggcatggtcgaggccgaagaacaaactttcattgagcagctcgtcgcgcatgcggccgttgaaactctcgacatagccgttctgcattggccttcccggtgcaatgtagtgccactcgaccttgtgatcttttgaccaggc

SEQ ID NO: 37284 - DNA, 260 bp, Unknown
  Description of Unknown: RightRegion for integrase C27 sequence
cctcgacaccccacaggatcgcatccagatcaggaaaacttattcccttcaacaacatagaaagatgggcgttatgaaacaggattgtagtctctgcgccaatcctccatcttttcgcgggcatccgcaagggtcaggaaccaatgctgggtcagacattcggctcggaagcggccgttgaatgcttcgattaaggcattgtccgtcggctttcccggatgtgagaagtccaaggtcacacccttggcataggcccaaag

SEQ ID NO: 37285 - DNA, 260 bp, Unknown
  Description of Unknown: RightRegion for integrase C28 sequence
gtgccgtcacgccgtccggtaacacaggatccggatcagcggacccttgactttcaatgacatagcgaggtgggcattatgacgcgagagcggttccgccgacgaacacggcgttgcgctgggtttccaggaagccgccgtcgtgcaggtcgcacaccagcgcttcgttcaccgggctggccgcgaagtcgaactcggcaagcgtcctggccagcggcagcctggccgcgccgagctggtagcggatcgagcgcgccttc

SEQ ID NO: 37286 - DNA, 260 bp, Unknown
  Description of Unknown: RightRegion for integrase C29 sequence
ggaattcgcgcgaccacttcaggtttcgagttcgagatcgcgagcacgaaggcgtcctgaccagggcaaacagagggccccccgccttgcggcagggggccttcgtcatttccggcgccactggatggggatcgggggctgtcgatcgaagtgatcgacgcacctgtcagtgaggcggctcatcgctggcttcccgcacaggtagccgtacgcccactgctcggcgatgctcccatcctctcgcttgaaccggatcttct

SEQ ID NO: 37287 - DNA, 260 bp, Unknown
  Description of Unknown: RightRegion for integrase C30 sequence
gggattcgcggaaccacttcaggtttcgagttcgagatcgccagctccaagacggcctgaccaggcagaacgcaccaacaagcaagcccccgtccgtaagggcgggggcttcttgctgtctaccgttggagggtgtcctcccagcggacccggcgaaggcccctcgggtggcacgggcaggcgcaacggtgctggtggtagaccactccctgcaccgtcatgtcgaggttcccgtcgcagtactcatgcagctcgatgtc

SEQ ID NO: 37288 - DNA, 260 bp, Unknown
  Description of Unknown: RightRegion for integrase C31 sequence
gggattcgcgcgaccgcttcaggtttcgagttcgagatcggcagcgcaaagaccgcctgacctgcaacaacaagaagcccccgccatgtggcgggggctttctgctgtctactggcacctactcctcggccgcgggggtctcgttcacgtaggagcccatgcccacctcggtacggaccgagccgtcggcgcggagagcccgaatgaccttctgccccgtgaccgtcgacatgccgaactcttcagagagtgcgagcacc

SEQ ID NO: 37289 - DNA, 260 bp, Unknown
  Description of Unknown: RightRegion for integrase C32 sequence
acgatccagtgggtacacacgcagaaataccgtaaggccatggccgaggctgtggcctaggtcactcgaacggcctagtcagggtcgcccctcatgcttcgcagaccagcggaggaggggcggcccttttttcgtcaccactccataccccctctgacctgggacaatgttacgagtgttgattctgaacatgaaactaggtcaccccttgagaaacccaatggggtccggaaaactctctcccgatcagcactcgacac

SEQ ID NO: 37290 - DNA, 60 bp, Unknown
  Description of Unknown: RightRegion for integrase C33 sequence
atcacagctttatacgagcgactctcaaaggatgatgaggtgcagggagagtcaaacagt

SEQ ID NO: 37291 - DNA, 260 bp, Unknown
  Description of Unknown: RightRegion for integrase C34 sequence
acacgtggagtgtgttgctctgcttgtaaaagcttagaaacctttgaacgaaagggataatgaaagccttgattgcaaggctttttgctttatggtgggtaagtatcagagtgagaaaatttttggaatgagtagaagtgatagctagaaattatcagtttctatttccatttaccctgtgggtacgtgtttgtttccattgacaaggagtttgtgggaatagaaatgtacccaccttgtttgaatcaagtgaagtgtag

SEQ ID NO: 37292 - DNA, 260 bp, Unknown
  Description of Unknown: RightRegion for integrase C35 sequence
ctgcgcttcgggctggctaagaacgccccagcgaaaaccacttccgaaactctcgtttgatcgcacgtatttatcggaggtgcacctgtgagcacctctgtaactcttcggggtggctccgctgcccctaatcgctccaagctcgtcaccgggccggagcaattacctctcttttctctccccacgtgtcgccgcgaccgccgcatgcacctggctcgtctgttctggcacgtgaactatctggatgcctgccacggctg

SEQ ID NO: 37293 - DNA, 260 bp, Unknown
  Description of Unknown: RightRegion for integrase C36 sequence
tgtattgaactgtccgcaaaaaatgaccgactgacattgtccagcgaaatggacgactaattcgacaaggaaacatgcaccaggaggtagatatttatcactatattactaaagggagcttcgacaattacctatggcagacacaggagaataagctaaagtatatcacccagataatgacctcaaaagatcctgtgagatcagctgaagacattgatgaacaaaccatgactgcctcagactttaaggccttggcaact

SEQ ID NO: 37294 - DNA, 260 bp, Unknown
  Description of Unknown: RightRegion for integrase C37 sequence
cctcaaaacagtgacgaggataaaaaaatgtattctcaaggaccagacaacacacgttgaggtagttggtttgctggtaaaatcctagaaacggttgaacgaaagcattattaaaagccttggagacaaggctttttactttggggtgggaaagtatcaaagtgactacctcagttgaggtaattgaagtactagggactaattcgttaatttatttccatagacgcatggaggggatattttaagaaacgtttgaggaa

SEQ ID NO: 37295 - DNA, 260 bp, Unknown
  Description of Unknown: RightRegion for integrase C38 sequence
cagcgcggcttcgtcattggggaaatgccccctggcccggaccgcccggcgcagctttgagttcaacgcttcaatggcattggtcgtgtaaaggatgcgccggacctcgcgcgggaaggcaaagaaggggatgacctcctgccacgcccgccgccaggccttgccgatggccgcgtatttttcgccccaaggcccggtctcaaaggcggtcagggccatctcggcggccttgtcgtcgacagcgtcgtagaccgtcttca

SEQ ID NO: 37296 - DNA, 260 bp, Unknown
  Description of Unknown: RightRegion for integrase C39 sequence
gaaattagtttggacaataatgagcacgtggagtgtgtcgctctgcttgtaaagaactagaaaactttgaacgaagggattccatagagaattactcattttctctaattagataaaatgtaacctctgttattcttgtataactactttacaagttttgaaaaattggtatgatctgcatcatttatatatttgtatgtttatgttcgagagaaatctatacgcatagttaagaaagaaaagagccgcgaaagcgactc

SEQ ID NO: 37297 - DNA, 260 bp, Unknown
  Description of Unknown: RightRegion for integrase C40 sequence
cacaacaaggcatcaaccgaatactttaagaatgtcaatgtttcagtgaagtacgcttaatcaaatcattcgaagattatactggattgaaagttaataaaggtttattattaaacttagtggttgaaattaccattgacaaagatgatgtggcaattatcgattataaataatacgaattgaggagatgtttaattatgtcagatttaaaagaagtaacttcgttagctttcacattgttaattcaatcaggtgcgtta

SEQ ID NO: 37298 - DNA, 260 bp, Unknown
  Description of Unknown: RightRegion for integrase C41 sequence
ggggcccggttcaacggtgaacagcgcgtgcgtatccggtgggccgatgaggacgactaggcacccctagatgttcaagggtggtagggcagtgtgaggtacgccacactgtgaggtaacagagcggtcacggggacacctcccgtggccgctttcctcgtttcagcgcgtgccgcgcaacagcgccgaggggcaacctacactcaccacaccccctctgaccagggacaatgttacgagtgttgattctgacattaaag

SEQ ID NO: 37299 - DNA, 260 bp, Unknown
  Description of Unknown: RightRegion for integrase C42 sequence
ggggcacggttcaacggagaaaagcgcgtccggttcgcatgggccgaccaagacgcgtgagcacccctggacgttgaggggtgggcagttgtgagctaggccacacgtaacatcacagagcggtcacgggatctcggtcctgtggccgctctttgcgttcagcgcgtgccgcgcatgacagcggggaggggaaccgacatccgagacaccccctctgacctgggatgatgttgtgagtgttgattctgacacccaaagtg

SEQ ID NO: 37300 - DNA, 91 bp, Unknown
  Description of Unknown: RightRegion for integrase C43 sequence
acaccaattctaagatacaacttcctaattggggaaacagtcagcagctacgaatcgtagtcattatcttgataaacagataaagctgtat

SEQ ID NO: 37301 - DNA, 260 bp, Unknown
  Description of Unknown: RightRegion for integrase C44 sequence
ggggccatgctgcgaacaattggcgcgtcgtggtcaccgttctcgcagagtgcttcgtaggtcggctcaatccttcttgttgtaagaagcgaccgtatcgagaatagccttcaccagatcgatcgagtactgaggaacttctgccttaagtgcaaccccctccgccgtgtttccgaagaacttctccgcaagcttgaccttgacttcgttcttgacgctgtcaggcagccccgtgagataagggtcaacagcagacaact

SEQ ID NO: 37302 - DNA, 260 bp, Unknown
  Description of Unknown: RightRegion for integrase C45 sequence
gtgcaccccgtatgggagcctgacccctgggccgcgacggaggtcgcaaccacagcgtaggagcatgttttgtacacagtgaccaccggtactgtgtgtgaaacatgctgccgttgagctgcggaaatgcgtaaaagggccccgcaggaagaacctgcggggccctaccggccgcgtgcgtcacatcacatgcccgcacccctggcacacgaactggctctcgttcgtggggttgccctgatcgtccgtttcgacggtct

SEQ ID NO: 37303 - DNA, 260 bp, Unknown
  Description of Unknown: RightRegion for integrase C46 sequence
gtgcaccccgtatgggagtctgacccctgggccgcgacggaggtcgcaaccacagcgtaggagcatgttttgtacacagtgaccaccggtactgtgtgtgaaacatgctgccgttgagctgcggaaatgcgtaaaagggccccgcaggaagaacctgcggggccctaccggccgcgtgcgtcacatcacgtgaccgcagccctgacacacgaactgtgttgcgctcgtcgggttgccctggtcgtcggtctcgattgtct

SEQ ID NO: 37304 - DNA, 260 bp, Unknown
  Description of Unknown: RightRegion for integrase C47 sequence
actgtagatggaaataagataaaaattgatgctaaatttaatttgataaagaataattaatagtaattgatgaggctcatcgaacctctatatatttttttatgttttaaggtaaagtattttttactaatttttacatctgttacattttactaaccaaaatttttgcaataacttacctactatttgtccaagttgtcatttgctaatccaccattgggtaaataaatataataaataatcatataatctgttcacat

SEQ ID NO: 37305 - DNA, 260 bp, Unknown
  Description of Unknown: RightRegion for integrase C48 sequence
gataacgaaagaatacaggaaattgagatatattaccgatttattggaagagttgagtaatcaacaagagtaatatttttaactaagggaaaccggcggtgtctatacttgggtcagtcgcacattgggaaaacgattcggttttgccgcaatctttttccaatggtttgagataacagttggctacttgaccatgctgtatttcttaactggtgcattatcctatgcaacgggtattggtgctatacaaaacaataaat

SEQ ID NO: 37306 - DNA, 260 bp, Unknown
  Description of Unknown: RightRegion for integrase C49 sequence
cgtgaggtgtaccgggcggggattctcgcacatcgggtcgagttcgtctggcgcgcctaacgcccccgcgccttcggcaggccgcagagggcttgcagttgctcacgcacccgtgggtcagcgatgaccggaggcaggccctgcgctgcgcggctctcccgcgcgaggcgtgcgccgagtggttcgggggcatcggtcgaggctggttcgggcgtggttgtggtggtctgcgtcgaggtatccatgtagacaggtacgac

SEQ ID NO: 37307 - DNA, 260 bp, Unknown
  Description of Unknown: RightRegion for integrase C50 sequence
gccaaccaaagcgctactggagaagttgaagctggcacgcccactggacggcgcaaatgaaaaactctcaaaatagcgtagcgatttacgatgcagaaatgtagcgttggttgatttcctcgatcgtctgctaagggtcgatttcgggtatgcgttagaactgtaatgtccgcataggtcggttggaagcatacctcctagtcttggcataatttgcgctatcttgcctgcacgcccttaggttgcaatgtcgctaagca

SEQ ID NO: 37308 - DNA, 260 bp, Unknown
  Description of Unknown: RightRegion for integrase C51 sequence
ccgaaggacgtccgtgagcgactgatcgtccgagaggacgacttcgccgagcggttctgaggcacaacgcaagaagcccccgtcctcggagatgaggcgggggcttcgttgtgcgctacagcagctcggggtcgaacggaacttcggtgccgtcctccaggacgatcacgatgtggccctcgatcacggtgccactcgtccggccatctcgaaggcgcggtgagtgacgggcatggtgtccatgaagatgagctccatct

SEQ ID NO: 37309 - DNA, 260 bp, Unknown
  Description of Unknown: RightRegion for integrase C52 sequence
cccgaggacgtccgtgaccggctcctgatccgtgaggactcgttcgccgaagcgttctgaggcacaacgcaagaaggcccccagtcgagtgactgggggcttcttgttggttcagcgcaagcgatccgggtcgaaggggatgagctcaccctcctcggtctcgatgacgacctcgatctcgatcactcctgaccctccagctcccggaccttgtcctggaagtgctggctgcggcctgcttcccgcaggagcaggaggcg

SEQ ID NO: 37310 - DNA, 260 bp, Unknown
  Description of Unknown: RightRegion for integrase C53 sequence
tacgagcagcatctcaggctcggcagcgtggtcgaacagctacacaccgggatgtcgtagagcgactacccccgagaacgcagaaaagccccctacgcgccgcgtaagggcacgcagagggctctctggtagtctctattcagttgtgaggttgcgtacgtcagcgtggacgctagaggggtttacggggcctcgtggacccgcacgtacggttgcagaggcttgtcacggtaggcgtggtatcgctcggcctcctcggc

SEQ ID NO: 37311 - DNA, 260 bp, Unknown
  Description of Unknown: RightRegion for integrase C54 sequence
tacgagcagcatctcaggctcggcagcgtggtcgaacggctacacaccgggatgtcgtagagcggctacccggagaacgcagaaaagccccctacgcgccgtgtaagggcacgcagagggctctctggtagtctctattcagttgtggggttgcgtccgtcagcgtggacgctagaggggtttacggggcctcgtggacccgtacgtacggctgcagaggcttgtcacggtaggcgtggtagcgctcggcctcctcgacg

SEQ ID NO: 37312 - DNA, 260 bp, Unknown
  Description of Unknown: RightRegion for integrase C55 sequence
tacgagcagcatctcaggctcggcagcgtggtcgaacagctacacaccgggatgtcgtagagcggctacccgagaacgcagaaaagccccctacgcgccgtgtaagggcacgcagagggctctctggtagtctctattcagttgtgggtgtgcgcccgtctccgtggacgctagaggggtttacggggcctcgtggacccgtacgtacggctgcagaggcttgtcacggtaggcgtggtagcgctcggcctcctcggcgc

SEQ ID NO: 37313 - DNA, 260 bp, Unknown
  Description of Unknown: RightRegion for integrase C56 sequence
agcagcatgacgcgggtggagtgtcaccccgtgtgggacccggacccatggagtgcctgatctgcgagaactccggatggtgattactgatcgtatgcacttgttttggcaacactgacacttgacagtgtctgcaaaacaagcgtctcggtcgacgccttcggctaccggaacgcgcaaaagggccccgcaggttcttcctgcgggaccctaccggccgcgtgcgtcacatcacatgcccgcacccctgacacacgaac

SEQ ID NO: 37314 - DNA, 260 bp, Unknown
  Description of Unknown: RightRegion for integrase C57 sequence
tacgagcagcatctcaggctcggcagcgtggtcgaacagctacacaccgggatgtcgtagagcggctacctgagaacgcagaaaagccccctacgcgccgtgtaagggcacgcagagggctctctggtagtctctattcagttgtggggccgcgtccgtcagcgtggacgctagaggggtttacggggcctcgtggacccgcacgtacggctgcagaggcttgtcacggtaggcgtggtagcgctctttctcgtcggaga

SEQ ID NO: 37315 - DNA, 260 bp, Unknown
  Description of Unknown: RightRegion for integrase C58 sequence
caaccacattacgcgcaacgcctaacttttgaccgggacacgctacaaaaacacgtataaatgttgcttttcggcgcacaatataaacatgaaaaaattacttttaatgtcgcttgctgctcttgccattggtgcgccgtccgcgtctgcgtctgaatgtactgtacgtcacggcgattcattgtggaaaatcgcggaacgatacaatgtggattttaaccacataaaaaatataaacaaacatttaaaagacctgcaca

SEQ ID NO: 37316 - DNA, 260 bp, Unknown; identical to SEQ ID NO: 37315
  Description of Unknown: RightRegion for integrase C59 sequence

SEQ ID NO: 37317 - DNA, 260 bp, Unknown
  Description of Unknown: RightRegion for integrase C60 sequence
  modified_base (175)..(176): a, c, t, g, unknown or other
gacaagttcagcgtaacttttaaatcagagattagtgttgatgttgaaagggcatcgtaaaagccaaaggaatgtgagcatttgaaatgttacaaaactcagcctaggggggaatcctctctaggctgtttttatgctaaactcaagctattaagcaaacgtaaaccttttaacnntttaagctgggttcttgcggtttttgagagtgattttgctgtatgagggaagatatcaacgctctagggtcgagtgcacaggat

SEQ ID NO: 37318 - DNA, 260 bp, Unknown
  Description of Unknown: RightRegion for integrase C61 sequence
actcgaaattcagagagacaaaattatccctttaatataaaatttgagttctttgattgatctatatacagcctttgtgttgcttaatttgtctgtatatagtaactgattctaaataaaattcccattttatttaaacccgaaagctgcttgaatacatcgcaaatataaagtatcctgtatatgtatcataggggtttaacagccactataactccagagagctccctcacatagctctctgttttttttaatttata

SEQ ID NO: 37319 - DNA, 260 bp, Unknown
  Description of Unknown: RightRegion for integrase C62 sequence
gtgatcaagctgcgggaagagggatgggcggagttctggagcagcatatccagcgaatgaaatatttacacaaggcaccatcattggtagcagttcccccggatgatgatagtcggaggaaagtgcaatgcggtttttagtcttggcggttggagccctgtttttggttggctgtgctcaggtggtttccgtctgggcaaagcctggggctaccgaggaagaagagcgtgccatcgggaaaaaatgtgaatacgaggcgg

SEQ ID NO: 37320 - DNA, 260 bp, Unknown
  Description of Unknown: RightRegion for integrase C63 sequence
tacgagcagcatctcaggctcggcagcgtggtcgaacggctacacaccgggatgtcgtagagcgactacccccgagaacgcagaaaagccccctacgcgccgtgtaagggcacgcagagggctctctggtagtctctattcagttgtggggttgcgtccgtcagcgtggacgctagaggggtttacggggcctttccagcctggcgtccgcgcccgcctgtaagggtgtgtgagcagtgcagtacgggtctacccggctg

SEQ ID NO: 37321 - DNA, 260 bp, Unknown
  Description of Unknown: RightRegion for integrase C64 sequence
tacgagcagcatctcaggctcggcagcgtggtcgagcggctacacaccgggatgtcgtagagcggctacccgagaacgcagaaaagccccctacgcgccgtgtaagggcacgcagggggctctctggtagtctctattcagttgtggggttgcgtccgtcagcgtggacgctagaggggtttacggggcctcgtggacccgcacgtacggctgcagaggcttgtcacggtaggcgtggtagcgctcggcctcctcggcgc

SEQ ID NO: 37322 - DNA, 260 bp, Unknown; identical to SEQ ID NO: 37314
  Description of Unknown: RightRegion for integrase C65 sequence

SEQ ID NO: 37323 - DNA, 260 bp, Unknown
  Description of Unknown: RightRegion for integrase C66 sequence
tacgagcagcatctcaggctcggtagcgtggtcgaacggctacacaccgggatgtcgtagagcgactaccctgagaacgcagaaaagccccctacgcgccgtgtaagggcacgcagagggctctctggtagtctctattcagttgtactgctgagtccgtcagcgtgggtgctagaggggtttacggggcctcgtggacccgcacgtacggctgcagaggcttgtcacggtaggcgtggtagcgctcggcctcctcggcg

SEQ ID NO: 37324 - DNA, 260 bp, Unknown
  Description of Unknown: RightRegion for integrase C67 sequence
agatttctttttattttgaaatgcggattggaattagaagaagaggtgaaagaaacatgacacgcatcccatatggttaccgaatagtagacggtaaagcggttatagatgaagtaaaagctcaagaagtaagagagttttttcgtttctatcttgaatttaaaaatatttctcaagctgctaaaaaatcaggtataaaaagggcttggccagtcacgggcaaaattcttagcaagaaattgtatttaggaacagagttt

SEQ ID NO: 37325 - DNA, 260 bp, Unknown
  Description of Unknown: RightRegion for integrase C68 sequence
tatgaagataagctcaccgttgaattcaagtctgggattgagattgacgaagagatatagaatattaaccgccaattaggggctagcaccctttggcggttaatattggatttttttaattttaaagttgcttaaaacgacttgttgtgttaaaatatacgctgatacaaataagaatttaggaggaaccgaaactatgacagcctcaatgcgtttaagataagctggcaataaaaaaagcagaatctatccccgatgat

SEQ ID NO: 37326 - DNA, 260 bp, Unknown
  Description of Unknown: RightRegion for integrase C69 sequence
acagtttttgatgatatgcttacagtagagtttaagtcaggtgcagaaatagaggtataagagaagatttacaaaggccgccaactggggatacattccttggaatggcggtttttcttatgtacaaaattataaaacttgaaatatctggttcaatgctttataattaaggttgtatagaattaaagttatgaggtgattagtcaaaatgatcatataatcttatccactagtttttcaagttacagtagcatgggtag

SEQ ID NO: 37327 - DNA, 260 bp, Unknown
  Description of Unknown: RightRegion for integrase C70 sequence
tacgagcagcatctcaggctcggcagcgtggtcgaacagctacacaccgggatgtcgtagagcggctacccgagaacgcagaaaagccccctacgcgccgtgtaagggcacgcagagggctctctggtagtctctattcagttgtgaggttgcgtacgtcagcgtggacgctagaggggtttacggggcctcgtggacccgcacgtacggctgcagaggcttgtcacggtaggcgtggtagcgctcggcctcctcggcgc

SEQ ID NO: 37328 - DNA, 260 bp, Unknown
  Description of Unknown: RightRegion for integrase C71 sequence
ataaaagtagacaagcacatcagcctaaccttcaaaaatggcgtgcggattgatttataaaagacaaggcgtgtcagaattggcacgtctttttttgatgtttctgtgttataatagaagaagttatactaggatttgagatgcacacccctttagggttttgcacccccttgaaagggaaaaggttagattgtatgataaagctgattgcaacagatatggacggtacatttttggacgagaaggggcgggttgactcc

SEQ ID NO: 37329 - DNA, 260 bp, Unknown
  Description of Unknown: RightRegion for integrase C72 sequence
gtctctggtgcgaaagagatattcataaaatttaaaaacggacaaatcgtaagagtttaaaattttattgaaagttggtgatagtaatggtatagtagagtatgttcatacagaccttagtagacatttgttgtctattaaagtgtgtattagtatataacatattagggttaaacttggacattggtcttctatgtgatttaattcagactattttggcatttgctagtttagaaagaggtatatctatgaagatgtct

SEQ ID NO: 37330 - DNA, 260 bp, Unknown
  Description of Unknown: RightRegion for integrase C73 sequence
atcaatccagggaaaaaaataattattaaatttaaaaatcaaacggtcgtaactatctagtttacgaccgtttgttttatatccgcattttctcgattaagcaatcaattaagaataccctttcctcaatttttggaataataaaagttgattgaaaaatgattgttatcccaacgaaaattccccaccagaaagttgaaaatagagtaattgtaccgttgttaaaaaagtctaagtttgaaattataaaggatacaagt

SEQ ID NO: 37331 - DNA, 260 bp, Unknown
  Description of Unknown: RightRegion for integrase C74 sequence
gcttcgcttgatcctgtggttgagatggcgagacgagaaccaatgccggcaaatatatgagaactacgaaagccgggcttcgcgacttcgtcacaaacaatcggcatgccattcggctgacggtagattcgcgggcgccgatgaacccgctgcgtgtctccggtttgttgaagacctacaggcgccaagtcgacaatatgcaggaattcatcagggaagccgacgcggtgaaacaccagatggaaagcgtcgtcgatgcc

SEQ ID NO: 37332 - DNA, 260 bp, Unknown; identical to SEQ ID NO: 37331
  Description of Unknown: RightRegion for integrase C75 sequence

SEQ ID NO: 37333 - DNA, 260 bp, Unknown
  Description of Unknown: RightRegion for integrase C76 sequence
ttcgaagcgtgggaggagagagccgccgaggagcgactcaagcacggagtcccctcgtagcgtcaccgtgacgatttgcgcctttgcctcttgaccttcggaggcagaggtgctacgacctccacggtcccgtcaggcttggtgacggtcactggacccgctttcgggcggatgtctacgaccctgcgacgggccttgggggtgtactcgactccgtagccttgactcatgctctgagtatccctatcccgtcctcgatc

SEQ ID NO: 37334 - DNA, 260 bp, Unknown
  Description of Unknown: RightRegion for integrase C77 sequence
ggcggcgaagagttcctggcttccaccgtcctagctaaagcgggcattacgtcacggtgacgctttaaacgcaaaaaagccccccgaagcgccgaagcgccccgaggggtttctttgtctagtaggcccggatccagacctggccacgaccaccgtcgtagcctcggctgagctgagcggagccgttgcctgcgcctccgggtaccttgccgtcttggctgttcgcggtgttgtcggcaccgcccgtgtagaggatgccg

SEQ ID NO: 37335 - DNA, 260 bp, Unknown
  Description of Unknown: RightRegion for integrase C78 sequence
agagaaataccgatgctgtggagtgagcaaagggagaaattttacggctcagcgtcgtaacgtttataaaaacaacaatatgaaaaaacatcgaaaaaagtatgtgccagaaaattaaaaaaggttattacaaaaggagctactacaaagggccacacaaaagatgctgaaattgatatagaaaagtaagtcaatgttacagaatcaattatgtgaaaatatcaatataaataatgaagattttagtatattggatgcaa

SEQ ID NO: 37336 - DNA, 260 bp, Unknown
  Description of Unknown: RightRegion for integrase C79 sequence
aggtacctgctctgtcggaagggcgagcgcagctacttcgatcgaagctacgatgggtagctcacagcactctcacagggggagatctatgtacgaccgaccggtgcaaccgggttggtatccggatccgaacggcataccggggctcaggtggttcgacggcgagcagtggacaccaaacttcagcggggcacagcaggggccagcgccctctcaggcggtcgctgagaagccgaaggaccggaaccccttgttcctgt

SEQ ID NO: 37337 - DNA, 260 bp, Unknown
  Description of Unknown: RightRegion for integrase C80 sequence
gctatcagcggaagcgacgggcgtcgctttcgcaattggcgtccgcgccgcaaatcatagaacacccgttctatactcccgcccatgacaaagacgtgggcggacggactgccgatccgcgttgaggcggttgacgcccagggcgtgccagcgtcgttcggctggcagggccagacccacgcggtcgagcgcctagtccagcgctgggaggtcgagaccgactggtggtctgaggagggcgagacgcgccgcctattcgt

SEQ ID NO: 37338 - DNA, 260 bp, Unknown
  Description of Unknown: RightRegion for integrase C81 sequence
gccaagggcatgagcttcgaggaccaggtcgtcgtggagcctcggtacgtggccgcgtagctcccggaacgcaagaagccccgtcctccagagggaggcggggctgtcttgtgtcaggcgacgtgtcggcgaggcggctgaagctctccgaacagggtccgcacgatgcgggcttgctcgccggtcggtggaggcggcgggttgtcagtccagtgccgctcccacctggcgatacggtcggtcatgctcacggggccact

SEQ ID NO: 37339 - DNA, 260 bp, Unknown
  Description of Unknown: RightRegion for integrase C82 sequence
ccccggaacatcgaagtcgttgtgccacaggaccgcgtggcggtcgacctggctatttgacatcgcctatgccagggtgtgtgccatgtcaaatccggtcccatacccctaccccgtaccgccgaagcgcaaggctgcgcctaacccgctgttcctcgtcctcgcgatcctgtcggcgctgccgaccgcgttcttcgggctcgcgttcctcatgtccccgacgatgctctgggtgatggcgaccgggtggtgcggtatgt

SEQ ID NO: 37340 - DNA, 260 bp, Unknown
  Description of Unknown: RightRegion for integrase C83 sequence
ccccggaacatcgaggtcgtcgtgccccaggaccgcgtggcggtcgacctggctatttgacatcgcctatgccagggtgtgtgccatgtcaaatccggtgccatacccctaccccgtacctccgaagcggaagccagcgcccaacccgctgttcctcaccctcgcgatcctgtcagggttcccctcggcgttcttcctcttgctgttcgtctccggtgcgacctcgatcctcgtcgctggcgggttcatctggtcagcca

SEQ ID NO: 37341 - DNA, 260 bp, Unknown
  Description of Unknown: RightRegion for integrase C84 sequence
gttgggaagggccgccggaacgtcccgatcggtgagggcatcgggctcacctggctgtgagtcagcggcgccgcgcgcgtacacgccgcaaccggttcacgaggaccggtgcgtgcgcgagggcctcggggtcgtcgagcaggttgttgacgcgctgccagaaccgggtgaccgagatcccgaactcggcgtggaccgcgtcggcctggttgccggcgtagttccatcggtgggcggcgaagtcgagcaatccgcggtcg

SEQ ID NO: 37342 - DNA, 260 bp, Unknown; identical to SEQ ID NO: 31321
  Description of Unknown: RightRegion for integrase C85 sequence

SEQ ID NO: 37343 - DNA, 260 bp, Unknown
  Description of Unknown: RightRegion for integrase C86 sequence
ccccggaacatcgaggtcgtcgtgccccaggaccgcgtggcggttgacctggctatttgacatcgcctatgccagggtgtgtgtcatgtcaaatccggtgccatacccctaccccgtaccgtcgaagcggaagcccgcgcccaacccgctgttcctcaccctctcgatcctgtcggggttcccgaccgcgttcttcctactgctcttcgtgaccggtggcacctcgatcttcgtcatgatcgggttcctctggtcagcca

SEQ ID NO: 37344 - DNA, 260 bp, Unknown
  Description of Unknown: RightRegion for integrase C87 sequence
ctgaggctgggctcggctctggacctcgtaaacgcagaaaagccccctacgggccgctagggctcgcagagggcttctccggtagtctctattcagttgtactgctgagtccgtcagcgtggacgctagaggggtttacggggcctcgtggacccgcacgtacggctgcagaggcttgtcacggtaggcgtggtagcgctccgcctcctcggcgcggatggcctcgatctcctgagccgcactcaccttacgacgctgca

SEQ ID NO: 37345 - DNA, 260 bp, Unknown
  Description of Unknown: RightRegion for integrase C88 sequence
ccccggaacatcgaggtcgtcgtgccccaggaccgcgtggcggttgacctggctatttgacatcgcctatgccagggtgtgtgtcatgtcaaatccggtgccatacccctaccccgtaccgtcgaagcggaagcccgcgcccaacccgctattcctcaccctctcgatcctgtcgggattcccgaccgcgttcttcctgatcctcttcgtgtccggtggcacctcggtcttcgtcatgatcgggttcctctggtccgcga

SEQ ID NO: 37346 - DNA, 260 bp, Unknown
  Description of Unknown: RightRegion for integrase C89 sequence
ccccggaacatcgaggtcgtcgtgccccaggaccgcgtggcggttgacctggctatttgacatcgcctatgccagggtgtgtgtcatgtcaaatccggtgccatacccctaccccgtaccgtcgaagcggaagcccgcgcccaacccgctgttcctcaccctctcgatcctgtcggggttcccgaccgcgttcttcctactgctcttcgtgaccggtggcacctcgatcttcgtcatgatcgggttcctctggtccgcga

SEQ ID NO: 37347 - DNA, 260 bp, Unknown
  Description of Unknown: RightRegion for integrase C90 sequence
cggcgcaagcatggaaagctcttcgagcccgagcgagtcgatatcaagtggtactcgtgacgccggaggcggcctcgcccctcgccgggagacgccggaggagtcgtgtaaacgccctcgcaagacggaaagcatgacgaaatgacggaactaacgtcatactccatctccccttaaagttctctctctcttaaagcccaaatacagaatgacgtttcttccgtcatatcgtcatgcggcccgtcatggcccctccaagg

SEQ ID NO: 37348 - DNA, 260 bp, Unknown
  Description of Unknown: RightRegion for integrase C91 sequence
tacgagcagcatctcaggctcggcagcgtggtcgaacagctacacaccgggatgtcgtagagcggctacccccgagaacgcagaaaagccccctacgggccgctagggctcgcagagggcttctccggtagtctctattcagttgtgggtgtgcgtccgtctccgtggacgctagaggggtttacggggcctcgtggacccgcacgtacggctgcagaggcttgtcacggtaggtgtggtagcgctcggcctcctcggcg

SEQ ID NO: 37349 - DNA, 260 bp, Unknown
  Description of Unknown: RightRegion for integrase C92 sequence
tacgagcagcatctcaggctcggcagcgtggtcgaacggctacacaccgggatgtcgtagagcggatacccgagaacgcagaaaagccccctacgcgccgtgtaagggcgcgcagagggctctctggtagtctctattcagttgtggggttgcgtccgtcagcgtggacgctagaggggtttacggggcctcgtggacccgtacgtacggctgcagaggcttgtcacggtaggcgtggtatcgctcggcctcctcggcgc

SEQ ID NO: 37350 - DNA, 260 bp, Unknown
  Description of Unknown: RightRegion for integrase C93 sequence
tacgagcagcatctcaggctcggcagcgtggtcgaacggctacacaccgggatgtcgtagagcggctacccgagaacgcagaaaagccccctacgcgccgtgtaagggcacgcagagggctctctggtagtctctattcagttgtggggttgcgtccgtcagcgtggacgctagaggggtttacggggcctcgtggacccgcacgtacggctgcagaggcttgtcacggtaggcgtggtatcgctcggcctcctcggcgc

SEQ ID NO: 37351 - DNA, 260 bp, Unknown
  Description of Unknown: RightRegion for integrase C94 sequence
tacgagcagcatctcaggctcggcagcgtggtcgaacagctgcataccgggatgtcgtagagcggctacccgagaatgcagaaaagccccctacgcgccgtgtaagggcacgcagagggctctctggtagtctctattcagttgtgaggttgcgtacgtcagcgtggacgctagaggggtttacggggcctcgtggacccgtacgtacggctgcagaggcttgtcacggtaggcgtggtagcgctccgcctcctcggcgc

SEQ ID NO: 37352 - DNA, 260 bp, Unknown
  Description of Unknown: RightRegion for integrase C95 sequence
tacgagcagcacctcaggctcggtagcgtggtcgaacggctacacaccgggatgtcgtagagcgactacctgagaacgcagaaaagccctctacgcgccgtgtaagggcacgcagagggctctctggcagtctctattcagttgtgaggttgcgtacgtcagcgtggacgctagaggggtttacggggcctcgtggacccgcacgtacggctgcagaggcttgtcacggtaggcgtggtagcgctctttctcggcggtcg

SEQ ID NO: 37353 - DNA, 260 bp, Unknown
  Description of Unknown: RightRegion for integrase C96 sequence
ctgaagtcgagcaagcccatgaacttcgctctacacgtcccgcagaaggaggcaggatgacgaacccagctccaggttggtacccggaccccgcaggtacaaaccagccgaggtactgggacgggaagaagtgggtgggagaaccgaccactgtgccggtgaagacgaaccacgcgctgcatctcctgctgacgatcctcaccttctggatgttcggaggctggctgtgggtctggattctcgtcgcaatcgccaaccac

SEQ ID NO: 37354 - DNA, 260 bp, Unknown
  Description of Unknown: RightRegion for integrase C97 sequence
tccaagttgccgctgggccacaacatcgacatccactggcataatcccagcgataattgagatccggttgacctgagcttcggtcaagggtgggctgtcagcggcttcgcgccggatggcagcccactctccttctgtcagaccgaggctcatcagatctcctccgtcttcaggttcggccagcagtaatgcacgaaccccatatcgtcctcgaccacgacatcaccacagtcactgaagctcagcagcttgccggtggc

SEQ ID NO: 37355 - DNA, 260 bp, Unknown
  Description of Unknown: RightRegion for integrase C98 sequence
tacgagcagcatctcaggctcggcagcgtggtcgaacagctacacaccgggatgtcgtagagcgactacccccccccccccgagaacgcagaaaagccccctacgcgccgtgtaagggcacgcagagggctctctggtagtctctattcagttgtggggttgcatccgtcagcgtggacgctagaggggtttacggggcctcgtggacccgtacgtacggctgcagaggcttgtcacggtaggcgtggtagcgctctttc

SEQ ID NO: 37356 - DNA, 260 bp, Unknown
  Description of Unknown: RightRegion for integrase C99 sequence
tacgagcagcatctcaggctcggcagcgtggtcgaacggctacacaacgggatgtcgtagagcggctacccgagaacgcagaaaagccccctacgcgccgtgtaagggcacgcagagggctctctggtagtctctattcagttgtggggttgcgtccgtcagcgtggacgctagaggggtttacggggcctcgtggacccgcacgtacggctgcagaggcttgtcacggtaggcgtggtagcgctccgcctcctcggcgc

SEQ ID NO: 37357 - DNA, 260 bp, Unknown
  Description of Unknown: RightRegion for integrase C100 sequence
ctgaggctgggcgcggctctggacctcgtaaacgcagaaaagccccctacgggccgctagggctcgcagagggcttctccggtagtctctattcagttgtactgctgagtccgtcagcgtgggcgctagaggggtttacggggcctttccagcctgccgtccgggtatacgatagtaaccggcttccttgcgtccagcgcgaacccgatcgtgttccaagtcccgctaccctgacgataaggtccgtctggtagagccaa

SEQ ID NO: 37358 - DNA, 260 bp, Unknown
  Description of Unknown: RightRegion for integrase C101 sequence
ctgaggctgggcgcggctctagacctcgtaaacgcagaaaagccccctacgggccgctaggggctcgcagagggcttctccggcagtctctattcagttgtactgctgagtccgtcagcgtggacgctagaggggtttacggggcctcgtggacccgcacgtacggctgcagaggcttgtcacgataggcgtggtagcgctcggcctcctcggcgcggatggcctcgatctcctgagccgcgctcaccttacgacgctgc

SEQ ID NO: 37359 - DNA, 260 bp, Unknown
  Description of Unknown: RightRegion for integrase C102 sequence
tacgagcagcatctcaggctcggcagcgtggtcgaacggctacacaccgggatgtcgtagagcgactacccgagaacgcagaaaagccccctacgcgccgtgtaagggcacgcagagggctctctggtagtctctattcagttgtggggttgcgtccgtctccgtggacgctagaggggtttacggggcctcgtggacccgcacgtacggttgcagaggcttgtcacggtaggcgtggtatcgctcggcctcctcggcgc

SEQ ID NO: 37360 - DNA, 260 bp, Unknown
  Description of Unknown: RightRegion for integrase C103 sequence
aaccttgagcgcctcgccgaattacgatacctgtccctggcgtcaatgttcggcccgtaagccagttcgacgcacagcctgaagcgcaacataccgacatcagcattagtgaggagttccgccatggcccggcttgtttcccgtggcgccgcactgtacgtgcgagcgtcgactgagcatcagaattactcgacagaccatcaagagtcggccctacgagaatatgcagttcagcacgatttcgaagtcattgctattta

SEQ ID NO: 37361 - DNA, 260 bp, Unknown
  Description of Unknown: RightRegion for integrase C104 sequence
ctgctcagataccagcagtttgcgtatgcctcaatgtctcgcgtatttggacttgactagtaagaagcacctatcagaaatgatagctcggaacccattactcggcgctaggatctgagccatgtctagcttgggagcgaaaccatgtgtgcattgttcagtactgtccgtttcgaggtacctcatccatacgaagtgcttgccgagcgggcatcgatcgaacctgtattgtaaggctgctcgtactttgattcgtcggc

SEQ ID NO: 37362 - DNA, 260 bp, Unknown
  Description of Unknown: RightRegion for integrase C105 sequence
gagcaatatctgagcatcccgtaccgcatcatgatccccacgaacgggcgcggagtatagcggcggaggggcggcaagtacaacagccggcggcacccggtcgccttgggcgcctgcaaaataattttgcaaaacacttgcgccccttggttttgtctgtacaataggcccatcagcagcaaagcaaccgccccggcggaaccgggaatcctgaaaggagcaacatcatgagcaacatccaaaaagccgccaaaaccctc

SEQ ID NO: 37363 - DNA, 260 bp, Unknown; identical to SEQ ID NO: 24713
  Description of Unknown: RightRegion for integrase C106 sequence

SEQ ID NO: 37364 - DNA, 59 bp, Unknown
  Description of Unknown: RightRegion for integrase C107 sequence
aggcttataaacaaggttaaggtgacagctgaggacattgttatcaattggaaaatata

SEQ ID NO: 37365 - DNA, 59 bp, Unknown; identical to SEQ ID NO: 37364
  Description of Unknown: RightRegion for integrase C108 sequence

SEQ ID NO: 37366 - DNA, 59 bp, Unknown; identical to SEQ ID NO: 37364
  Description of Unknown: RightRegion for integrase C109 sequence

SEQ ID NO: 37367 - DNA, 260 bp, Unknown; identical to SEQ ID NO: 24622
  Description of Unknown: RightRegion for integrase C110 sequence

SEQ ID NO: 37368 - DNA, 260 bp, Unknown
  Description of Unknown: RightRegion for integrase C111 sequence
acgacgtcgcggcgagcgccgatcgagcccgagcgcgtaacgttccgctggaactcctgacgccgggcggagacgccggaggaggagcgtgtaaacgccctcccacccctctcccatgacgaaaccatgacgatatgacggttctaacgtcatttcatatctccccttaagagctctctctctttaagcactaatagagaatgacgtaacttccgtcatatcgtcatggaaacgtcattgcatcccgtctgagcagatcg

SEQ ID NO: 37369 - DNA, 260 bp, Unknown
  Description of Unknown: RightRegion for integrase C112 sequence
gcgacgtcgcgccgggcgccgatcgaccccgagcgggtaactttccgctggaactcctgacgccggagccgcgacgccgggaggggagcgtgtaaacgccctccgtagtgaggaaaagtgaagaaagtgagctaagttccttccctcttgttctatctataaggactctctctcttatagctggaaccggagggaaggaactttcttcacttccttcactaaaacttccttcggcccgtcctgagcaactagcccgaccg

SEQ ID NO: 37370 - DNA, 59 bp, Unknown; identical to SEQ ID NO: 37364
  Description of Unknown: RightRegion for integrase C113 sequence

SEQ ID NO: 37371 - DNA, 260 bp, Unknown
  Description of Unknown: RightRegion for integrase C114 sequence
ggagcgttctacttcgatctcgttgtcccagaggacctccgggagcgaatgtccctctaacgcaaaaaagccccctcccggggatcacccaggagggggccattgcttactcgacggtgtagccgagaacggcgagggcatcctcgtgggatgtccctgccgggaatctgttgatcggggtaaggctggtagcgataccctcttcgttgcaggcgaagacgaccgtgggtcgaacgacctccttcagcgcctgcctgccg

SEQ ID NO: 37372 - DNA, 260 bp, Unknown
  Description of Unknown: RightRegion for integrase C115 sequence
gataggattgagatatttgagaacggggatataaaaatcgtctacaggatagaaatgtagtctttactatctacaattatgcataacaaatgaagtgcataattgtaactagtgattacgattataaaaactttctcaatatttttcagaagaataggagaatacatgttcttatttatatggtagaatattttgtaaatacagggagaaggcgttatttgtttgaaatgaagggggcttttcaattgagatttcacaaa

SEQ ID NO: 37373 - DNA, 260 bp, Unknown
  Description of Unknown: RightRegion for integrase C116 sequence
gataggattgagatatttgagaacggggatataaaaatcgtctacaggatagaaatgtaatctttactagttacaattacacattacaaatgaaatgtataattgtaactagtaattacagttataaaaactttctcaatatttttcagaagaatgggagaatacatgttcccatttgtatggtagaatattttgtaaatacagggagaaggcgttatttgtttgaaatgaagggggcttttcaattgagatttcacaaa

SEQ ID NO: 37374 - DNA, 260 bp, Unknown; identical to SEQ ID NO: 24767
  Description of Unknown: RightRegion for integrase C117 sequence

SEQ ID NO: 37375 - DNA, 260 bp, Unknown
  Description of Unknown: RightRegion for integrase C118 sequence
aagaaaattacactaagtaaagataagtatatcgaaatcgaatatacattttctttataattttatagttagttattagttactgtaagattcgtaactgtactaccaacagcgggtgattggtttggatttacggtatattcataatttacaagagcattatttgttaatgtgccactaggtggtatcgctaaaatttgtgcttgaaaagtaatgaatacagtatctcctgggggaatatctgctaagtgaataccaag

SEQ ID NO: 37376 - DNA, 260 bp, Unknown
  Description of Unknown: RightRegion for integrase C119 sequence
aagaaaatcacacttagtaaggataagtatatcgacatcgaatatacattttctttatagttttaaagttggttattagttaccgtgacatttatcacggtacccaataaccaatgaatatctgagaaattgaacatttttagtaaacaatattttctcaatatgagaattgcgctttacagaacgcatgctcttattaatgtgataaaatattctgtaaatataatggaaaaagtgttgcttattgaaatgaagggggt

SEQ ID NO: 37377 - DNA, 260 bp, Unknown
  Description of Unknown: RightRegion for integrase C120 sequence
accgtcacaaacccacgccagtggcacctccatgttgagtccctgctgggacaggattagatgtcctgcttgtcgaagcagggagggcagaaaccccagatggagtcgtgctcgggcatggacaccccgcacccgccacatggtgtcatcgggtactgcggacggttgtacctcagcttttctggccagatgacttctgcgactccgacgtcggtcgagaagactcggccgtcgtccattgggtatacgactctgtcgat

SEQ ID NO: 37378 - DNA, 260 bp, Unknown
  Description of Unknown: RightRegion for integrase C121 sequence
gtcgggaagggccggcggaacgtcccgatcggtgagggcatcggcctcacctggctgtgactcagcggcgtcgtgatcgcaaacgccgcagccggttgacgagcgccggtgcgtgctcgagcgccgcggggtcgtcgagcaggttgttcacgcgctgccagaaccgagtgaccgacataccgaactcggtgcggaccgcgtcggcctggttgccgctgtggttccagcggagcgcggcgaagtcgaggattcttcgatcg

SEQ ID NO: 37379 - DNA, 260 bp, Unknown
  Description of Unknown: RightRegion for integrase C122 sequence
ggtgtgttggagttccacctgaaggtccccgaggacgtgagagaacgcctctccgcttaaacgcaaaaaagccccctcccaagacatttcgtcctgagagggggtttcttcttagatcacgtcatatccgacctgcctcagagcttcatcgtgaggcgtgccggacagcagcgtatagagccggtccatgctcgtcgcaacgccgttctcgtcgcactccacgacgacggtaggcgaaacaaccaccgcgtgttgaccga

SEQ ID NO: 37380 - DNA, 60 bp, Unknown
  Description of Unknown: RightRegion for integrase C123 sequence
aacctgatagataaggtatttgttaaacctggcatcattgatataaattggagaatttag

SEQ ID NO: 37381 - DNA, 107 bp, Unknown
  Description of Unknown: RightRegion for integrase C124 sequence
gtattcggaaggtacccccaattgcccgttgttgaaataaccaactataaacttaaataattttttattatatgggttacttatcgtatcaatggatcctcatgcat

SEQ ID NO: 37382 - DNA, 260 bp, Unknown
  Description of Unknown: RightRegion for integrase C125 sequence
ggcgcactgaagttcgacttccgagtccccgaggacatcgagaagagactctccgcgtgaacgcaaaaaagccccccctcccggagcccgaaggccctgagaggggggtttctttgtgtctagccgactctggccatcgagaaccacgtcagcgatgcgttggcgtcaccgacaatggtgacatcaccatcggtcttgagaccgggctgcactgtcgcgcctgccgcgagatagtaggtcacaccgtcgccgccgtaggc

SEQ ID NO: 37383 - DNA, 260 bp, Unknown
  Description of Unknown: RightRegion for integrase C126 sequence
atgtcctccatgtctgtcgatgaccacgtcacgatcgagtggcgggacgtgagcgagtagcagatacgacgaagccccggctaccccctttcaggggtgccggggctttcgtttgtcagttgtggtggccgctctccatctgctcgatgacctccagggcctcctcgtacctgcctgcctcctgcatcaggaggaggcggaggtcggcgagcttgacctgggcccacttcgggagccgggcctctcgctcggagctcatc

SEQ ID NO: 37384 - DNA, 82 bp, Unknown
  Description of Unknown: RightRegion for integrase C127 sequence
gccgtccagatcgtgatcggggcggagggatggcaggagatccgggtgcagttgccttaacagggaaatccggcccctgaat

SEQ ID NO: 37385 - DNA, 260 bp, Unknown
  Description of Unknown: RightRegion for integrase C128 sequence
aatgcggtcgagtcagtgctcaacgagcctgaggacgcattgaacaggctgacggcctagctacttcccgttggcggcgttgtacgcatccacgatctccttggcgatgttgccacgggtcgcaacttcatagccgttctctctggcccattccctgattgctgtgcgctcttgcttaccggcattgcgcggtgcaacttctatgttggtcctggtcctacctcggggctgtttcactttcatgtgggcggcctctaggt

SEQ ID NO: 37386 - DNA, 260 bp, Unknown
  Description of Unknown: RightRegion for integrase C129 sequence
atgtcctccatgactgtcgatgatcacgtcacgatcgagtggcgggacgtgagcgagtagcaggtacgacgaagccccggctaccccctttcgggggtaccggggccttgtcttgtctcactccccccgttcgggggtggtgtcagttgtggtggccgctctccatgcgctcgatctccttcagcgcatcctcgtacctggccgcctcctgcatgaggagcaggcggaagtcaccgagcttgtcctgcgcccaccgcggc

SEQ ID NO: 37387 - DNA, 260 bp, Unknown
  Description of Unknown: RightRegion for integrase C130 sequence
tataagcgtggaacaggaaaggctagagaaatcattattgtttcagcctcagctaaataaagtgtcttttgtaggtaacagtactattatacccacaaaagacacacaatttacaactcataaaaagacttaatatcacaagggagtttctcacacaaactgaggaactctctttttcttttttcgctcattgtaaatatacaaagcttaggttgctgtccgaaccggttcttaatttcttgccacatctctttatactt

SEQ ID NO: 37388 - DNA, 260 bp, Unknown
  Description of Unknown: RightRegion for integrase C131 sequence
aaggcgccccagcgcgggaagtggtcgccggagcgcgtccgcgtcgacttccacggctgacacgagcgccgggcaggagcgccggaggcgtcgtgtaaacgccctcccagatcgaatagtgacgatagtgagctaattacgtcactttcgtatccatgtataaggagtctctctcttataggtggataggaaagtgaagtaaaacgctcactatcgtcactttttcgtctctgtgagtagcaagtcgatcggggcaccct

SEQ ID NO: 37389 - DNA, 260 bp, Unknown
  Description of Unknown: RightRegion for integrase C132 sequence
aaggcgccccagcgcgggaagtggtcgccggagcgcgtccgcgtcgacttccacggctgacgagcgccgggcaggagcgccggaggcgtcgtgtaaacgccctccccagatcgaatagtgacgatagtgagctaattacgtcactttcgtatccatgtataaggagtctctctcttataggtggataggaaagtgaagtaaaacgctcactatcgtcactttttcgtctctgtgagtagcaagtcgagcggggcacccta

SEQ ID NO: 37390 - DNA, 260 bp, Unknown
  Description of Unknown: RightRegion for integrase C133 sequence
ctgacctccatgactgtcgatgatcacgtcacgatcgagtggcgggacgtgagcgagtaacgggtacgacgaagccccggctacccccattcgggggtgccggggctttcgcttgtcagttgtggtggccgctctccattcgctcgatgatgccgagggcgtcctcgtacctgcctgcctcctgcatcaggaggaggcggaggtcggcgagcttggctcgcgcccacttcgggaggaccgtctctcgctcggagctcatg

SEQ ID NO: 37391 - DNA, 260 bp, Unknown
  Description of Unknown: RightRegion for integrase C134 sequence
cactggaacgacgaccgcgtcgagctcgtcgactacatggccgggcagctcgacgactagctcctcctcccccgtaccccctcctgggacgccggggatgccgctgcctacgtcacaccccctagctatccatagaagaagaccgcctccgcccgtctagcgccggtgaggtgaccataacgaaacaacaacgaacgtcttacgggtgacgtagaatcgagacaacttcgctcacgagtgacgatatgacggttattccg

SEQ ID NO: 37392 - DNA, 260 bp, Unknown
  Description of Unknown: RightRegion for integrase C135 sequence
ccgacgaaggcgaaggccctcgtcccgacctccaccgaggtcgtgcccagacgaaggtgacaacacagaaaggccccctccccggcgcaatgccaggaagggggccttcgtcatgctgcttgctgttcgtctcgcaagcgagcgcggtaccggaggttgatccgggtcagctcgcggttctgttgatcagtgaggggtggccagcccgcgacgatcgcgcgggccagctccatccgttcctcgaaggtcacgtgccgatg

SEQ ID NO: 37393 - DNA, 260 bp, Unknown
  Description of Unknown: RightRegion for integrase C136 sequence
cgagcgccccagcgcgggaagtggaaccccgagcgcgtctcggtagccttccacggctgactcctgaaaatcaccctccctcggctcggcgccggaggcggctcgccccgcgtcgacgccggaggaggagcgtgtaaacgccctcagtgactccatgagtggtgaagtgacggatctttcgtcactctcgtttgttttctaaggaagaagaactctagagagagtaatagagagtgacggttctttcgtcactttcgtca

SEQ ID NO: 37394 - DNA, 260 bp, Unknown
  Description of Unknown: RightRegion for integrase C137 sequence
cgggcgccccagcgcgggaagtggtcgccggagcgcgtccgcgtcgacttccacggctgaaacgccggacggagacgccggaggaggagcgtgtaaacgccctccccaccctcccccatgacgaaaccatgacgatatgacggttctaacgtcatttcatatctccccttaagagctctctctctttaagcactaatagagaatgacgtaacttccgtcatatcgtcatggaaacgtcattgcaccccatctgagcagat

SEQ ID NO: 37395 - DNA, 260 bp, Unknown
  Description of Unknown: RightRegion for integrase C138 sequence
cgggcgccccagcgcgggaagtggtcgccggagcgcgtccgcgtcgacttccacggctgaaacgcgggaggcgggacgccggaggaggagcgtgtaaacgccctccaagaggctaggagtggtgaagtgacggatctttcgtcactcccgtttgttttctaaggaagaagaactctagagagagtaatagagagtgacggttctttcgtcactttcgtcacctttcgtcaccgcctcccccaaaccgacccaaaaaattg

SEQ ID NO: 37396 - DNA, 260 bp, Unknown
  Description of Unknown: RightRegion for integrase C139 sequence
agggcgcctcagcgcgggaagtggaaccccgagcgcgtccgcgtcgacttccacggctgacgccgggaggcgagccgcgcccgttgcgccggagaggagcgtgtaaacgccctcccgagggcagatagtgaagatagtgagcgtattgcttcactttcgtatccatgtataagaactctctctcttaagcatggataggaaagtgaagtaacttcgctcacttgcttcactaaaacttcttcggccctccctgagcatcc

SEQ ID NO: 37397 - DNA, 260 bp, Unknown
  Description of Unknown: RightRegion for integrase C140 sequence
cgcaccttcgacacgcagactgtcgcctttaggccgaaaaatccggcgctgcagatgtagcctgcacttgctcgaccacaactgaatacaacaactgaatagggctcgacatgcaacagctcgccgatttcgaggcgcagtatggcgccgacatggacgccgccgcggcacagttccccccgctgaccgatgctcagcgcggtcaaatagccacggtgctgcgcggcaattcgacacggcactcagcggcggcatagaac

SEQ ID NO: 37398 - DNA, 260 bp, Unknown
  Description of Unknown: RightRegion for integrase C141 sequence
cgggcgccccagcgcgggaagtggtcgccggagcgcgtccgcgtcgacttccacggctgaaacgccgggcggagacgccggaggaggagcgtgtaaacgccctcccgaccctcccccatgacgaaaccatgacgatatgacggttctaacgtcatttcatatctccccttaagagctctctctctttaagcactaatagagaatgacgtaacttccgtcatatcgtcatggaaacgtcattgcatcccatctgagcagat

SEQ ID NO: 37399 - DNA, 115 bp, Unknown
  Description of Unknown: RightRegion for integrase C142 sequence
cgtgtaggtaagaatccaattgcaccagtaataaaggttacagatttcaaaataaaataatcgcagcctaactgtattcatttgatgtagttaggttgtgtttaattgaccaaac

SEQ ID NO: 37400 - DNA, 260 bp, Unknown
  Description of Unknown: RightRegion for integrase C143 sequence
cctgagtttgaaccgcgcctcactggtcttgcttcggaaagatggagagcactcttatagcccaggaggatctccatgccccagacacgctttacgaaagagtttcaggatgaggcggtgcggcttgctctgacgagcggccgcagccggcgcgcgattgccgcggatctcggggttggtctgtcgaccctgcgccactggattgatcgtcgccgcgagcgtgagatcgatgatccgcccgaagagcgccaggaggatat

SEQ ID NO: 37401 - DNA, 260 bp, Unknown
  Description of Unknown: RightRegion for integrase C144 sequence
aaactacacctgcatatacccgacgacatactggaacgtatggctttgaaaggagaatgatgaggaagctagtgccagtgttgctgctagcgctgacggcatgtagtaccaaccacgagacgcctacagaagccccggtgaagcggggggtagttgtgttcgaggtcgggggtgactattcgttcgcctcgtacgacgacaactaccaaaacggtattcgataccaaccaggtcagacccgagtggaactgcggggcgac

SEQ ID NO: 37402 - DNA, 260 bp, Unknown
  Description of Unknown: RightRegion for integrase C145 sequence
cgtgtgcgatcacgctgggagctgggggtagaggtgtaccccaagcgtctggcccaatgacgtaaccacaactgaatacacaactgaatatcgaggtgcggcggcttatgaccgatcagcagcgggccgaatggatcgcccggcagacagcccgatttcaacccggggatctggatgccgggcttgaggtggttcggcggcgcttgcgccgcaataggattgagactccccgcgcggcttgagttctcgggttgcgatgt

SEQ ID NO: 37403 - DNA, 260 bp, Unknown
  Description of Unknown: RightRegion for integrase C146 sequence
atcgggaaggggcgccgcaacgtgcctattggcgaaggcatcgaactcagctggctgtgaccggttcagcggcgccgcgaccgtatgcgccgcagccgattgacgagcgctggggcgtgctcgatggccgccgggtcgtcgagcaggttgttgacgcgctgccagaaccgggtgaccgagatgccgaactcggtgcggaccgcctccgcctggttgccggcgtagttccaccggtgggcggcgaagtcgagcaacgcgcg

SEQ ID NO: 37404 - DNA, 260 bp, Unknown
  Description of Unknown: RightRegion for integrase C147 sequence
accattacaatagagatacaaggtaaagactttgttatcactgatcacacgctcctttaagtgttttgcctaaaggagcatttacacttgatagtgctatgttaggcaaaaaaagagcgccctttaatggacgcccttttttatttgaatgatccccagtaatctacacgctttccgttttcactctcaccagttgccatataaccgtatgttccgtttgctcgtggttgtctgatccatacgtgaccatcttgctcaat

SEQ ID NO: 37405 - DNA, 260 bp, Unknown
  Description of Unknown: RightRegion for integrase C148 sequence
gatgtggtgcgcgccacgggccggacaccggcacaagccgcaggggaggtcctggcatgaggcgcacgacggtggaatttccaggggagccgatggtgttgcatacgcacgacggtggcatcgcggtctccatcccgatccgcgtgcgccgctacagcggccggcggcaggtggtggtgccgcagggcatcgcctccgcacacgaggaaacgcatgcgccaacagccctgcagattgcgttggcccgcggacaccgttgg

SEQ ID NO: 37406 - DNA, 260 bp, Unknown
  Description of Unknown: RightRegion for integrase C149 sequence
cacgttaaaagagggaaaactaagcattctatcaaaataaagaatattgatttttattaacttcttttgtgcggaactacgaacagtttatcaacacgaagtgtacaaactcccatacaaaaataaccacgtcaattaagacgtggtttctatttgtttaacttactaattttctttcgatatattttgggtatgctttttgcgggtacaaatcgccttttttatggtcaagtactacgtatctatcgtttacccaatat

SEQ ID NO: 37407 - DNA, 260 bp, Unknown; identical to SEQ ID NO: 24896
  Description of Unknown: RightRegion for integrase C150 sequence

SEQ ID NO: 37408 - DNA, 260 bp, Unknown; identical to SEQ ID NO: 24897
  Description of Unknown: RightRegion for integrase C151 sequence

SEQ ID NO: 37409 - DNA, 260 bp, Unknown
  Description of Unknown: RightRegion for integrase C152 sequence
gaatatgtaaaacttaaaaacaggcattctattaaaataaacgatatagaattttattaacttacgtacggaagtatagacactctattaatacttaatgtgtatacttccgtaaatttataaagaaagaccacacccattaaggaatagtctttaaaaaatattatatcttttaattgaaaatcaaaaattattttttatcagaaccctattttcccttcatcatcatctacaaaatttaacttcatcaatttctgtat

SEQ ID NO: 37410 - DNA, 260 bp, Unknown
  Description of Unknown: RightRegion for integrase C153 sequence
attatcgataacataatagtatttccagatggcaatataacagtaaatttccttatataatttatgtgtactaacttatatattccggaaggataatataggttagtacacgtataaaaatatcttttatattgacacaatttatttaacaagtataataataattgaaagtgaatttaaacaaatatacaccataaacacaacgtacctgcgaatacgttgtgtttttttctttttcaaaaaaagacgcttaccgctgc

SEQ ID NO: 37411 - DNA, 260 bp, Unknown
  Description of Unknown: RightRegion for integrase C154 sequence
ggcttgaataaattgctgcgcgatacccttgagtcaaatgcgttgcgagaggcagcatgatgaacgacggcacagacggcttcatcactaacataccgatggccttcaaaaaacgcagtggcaaggcggtgatcgtgctgcccaacggcgagcgcgctatcgcgcgccgagaagcaattattgacaattcgatgatcaaagttatagcaagggcttatcgttggcagcgaatgctgttggacggtacgcactcctcaatc

SEQ ID NO: 37412 - DNA, 260 bp, Unknown
  Description of Unknown: RightRegion for integrase C155 sequence
ggagagccccacgttacgtacaagagtccgcttcatgaaatggaagaacggctggaataattgtaacgggttcgattttgaagtaaaaaaaggtaaatagcaaccaaattcgttgatcaaataacagcatttattagcatccttagctctgtttgcgggttgagaagaaaagtctcttccagaacctatacctgtcgctgcgggtatagggaacaacgcgatactcacgaggctaaaaatagtttaaatataaattttca

SEQ ID NO: 37413 - DNA, 260 bp, Unknown; identical to SEQ ID NO: 24938
  Description of Unknown: RightRegion for integrase C156 sequence

SEQ ID NO: 37414 - DNA, 260 bp, Unknown
  Description of Unknown: RightRegion for integrase C157 sequence
atttcagaagatgggcagataagtgtaaaattcttagaggggactgaggtagatttgtaagtgactgtggccgaaaggttgcagtttttttgttgtttcgtggtataataaaactaatttaatgaatgataaaaggataggaggactaaataatggcaaatgaactacagccgctttctttactttttcaaaacagacttttcagaattccggattatcagagaggctatgcttggcagcagtcacagcttactgatttt

SEQ ID NO: 37415 - DNA, 260 bp, Unknown; identical to SEQ ID NO: 37414
  Description of Unknown: RightRegion for integrase C158 sequence

SEQ ID NO: 37416 - DNA, 260 bp, Unknown
  Description of Unknown: RightRegion for integrase C159 sequence
attgtggaggatggacagataactgtcagatttttagaaggaactgaggtagacttgtaactaggctattactctagttaatgtttgcaattagacatatatgcatcatacgagatttccaatggctcataaatcgaaatagttttaagctcaatcaacggtcgtggggctgaccccaaaaaagtgagaatttaataaaatcaccctagggctaccgtctccggtattcaaccggagacaggtagtccaatttttgttgg

SEQ ID NO: 37417 - DNA, 260 bp, Unknown
  Description of Unknown: RightRegion for integrase C160 sequence
ataggacttgatggtgaaataaccgtttgtttactggaaggaactgaggtagatttataaagcaaacgtaagcattatgtgcaatcctaccatgaggacgaggaaataaccccggagcaggctcacaagaacgctgtcgagctggcagagcatacaaaggcatggaaagggcatgaagttctgatagccacgcatatagacaaggggcatatacacacgcactttattgtcaattccgtaaattatgagaacggtcataa

SEQ ID NO: 37418 - DNA, 260 bp, Unknown; identical to SEQ ID NO: 37417
  Description of Unknown: RightRegion for integrase C161 sequence

SEQ ID NO: 37419 - DNA, 260 bp, Unknown
  Description of Unknown: RightRegion for integrase C162 sequence
atctcagaagatgggcagataagtgcaaaattcttagaggggactgaggtagaattataaagtagacaaaaggttgtaacaaaagtgggaaaccattgttgttacggccttttttcatattcttgtggtaaaatattaaaagacatttaggggatttaatcgctggaactcaagttttgatagaaaaatagattttaattatttgagttcaaatcttcaatttatttcaacaaatccccgtttatcgaacttagcaaact

SEQ ID NO: 37420 - DNA, 260 bp, Unknown
  Description of Unknown: RightRegion for integrase C163 sequence
ataggacttgatggagagattacggttcgattcctggaaggaactgaggtgggcttataaagtagatgaaaggctgtaatgacagtgggatgccattgttgttacagccttttttgcgtttttgtgatataatttagggagtattcattttagttatgaagagaaatatgagtaagattgtactttgtatttaatgatagtagcaaatctatgctactgaattttgaatagaaataatagttaattaagaatattaaaga

SEQ ID NO: 37421 - DNA, 260 bp, Unknown
  Description of Unknown: RightRegion for integrase C164 sequence
caaggtagccgcatattgccgagtgtccaccgaccaagacgaacagctatcaagttatgaaaaccaagttaattattaccgagattatatctccaaacacgaggactatgagttagttgacatctatgcggatgagggcatctcagcaaccaataccaaaaaacgtgatgcttttaaccggttgatacaagattgtagggctggtaaggtggataggattttggtcaagtcgatcagtcgatttgccagaaacacccttg

SEQ ID NO: 37422 - DNA, 260 bp, Unknown
  Description of Unknown: RightRegion for integrase C165 sequence
caaagtagccgcatattgtcgagtgtccaccgaccaagaagaacagctatcaagttatgaaaaccaagttaattattacagagagtttatctccaaacacgaggactatgagttagttgacatctatgcggatgagggcatctcagcaaccaataccaaaaaacgtgatgcttttaatcgcttgatacaagattgtaaggctggtaaggtggataggattttggtcaagtcgatcagtcgctttgccagaaacacccttg

SEQ ID NO: 37423 - DNA, 260 bp, Unknown
  Description of Unknown: RightRegion for integrase C166 sequence
caatgtggccgcatattgccgagtgtccaccgatcaagacgaacagctatcaagttatgaaaaccaagttaattattaccgagattatatctccaaacacgaggactatgagttagttgacatctatgcggatgagggcatctcagcaaccaataccaaaaaacgtgatgcttttaaccgcttgatacaagattgtagggctggtaaggtggataggattttggtcaagtcaattagtcgatttgcccgaaacacccttg

SEQ ID NO: 37424 - DNA, 260 bp, Unknown
  Description of Unknown: RightRegion for integrase C167 sequence
caaagtagccgcatattgtcgagtgtccaccgaccaagaagaacagctatcaagttatgaaaaccaagttaattattaccgagagtacatctccaaacacgaggactatgagttagttgacatctatgcggatgagggcatctcagcaaccaatacaaaaaaacgtgatgcttttaaccgcttgatacaagattgtagggcgggtaaggtggataggattttggtcaagtcaattagtcgatttgccagaaacacccttg

SEQ ID NO: 37425 - DNA, 260 bp, Unknown
  Description of Unknown: RightRegion for integrase C168 sequence
caaggtagccgcatattgtcgagtgtccaccgaccaagaagaacagctatcaagttatgaaaaccaagttaattattaccgagagtatatctccaaacacgaggactatgagttagttgacatctatgcggatgagggcatctcagcaaccaatacaaaaaaacgtgatgcttttaaccgcttgatacaagattgtagggccggtaaggtggataggattttggttaagtccattagccgatttgccagaaacacccttg

SEQ ID NO: 37426 - DNA, 260 bp, Unknown
  Description of Unknown: RightRegion for integrase C169 sequence
caaagtagccgcatattgtcgagtgtccaccgaccaagaagaacagctatcaagttatgaaaaccaagttaattattaccgagagtttatctctaaacacgaggactatgagttagttgacatctatgcggatgagggcatctcagcaactaataccaaaaaacgtgatgcatttaaccgcttgatacaagattgtagggctggtaaggtggataggattttggtcaagtcaatcagtcgatttgccagaaacacccttg

SEQ ID NO: 37427 - DNA, 260 bp, Unknown
  Description of Unknown: RightRegion for integrase C170 sequence
caaggtagccgcatattgtcgagtgtccaccgaccaagaagaacagctatcaagttatgaaaaccaagtaaattattacagagagtttatctccaaacacgaggactatgagttagttgacatctatgcggatgagggcatctcagcaaccaataccaaaaaacgtgatgcttttaaccgcttgatacaagattgtagggtaggtaaggtggataggattttggtcaagtcaatcagtcgatttgccagaaacacccttg

SEQ ID NO: 37428 - DNA, 260 bp, Unknown
  Description of Unknown: RightRegion for integrase C171 sequence
caaagtagccgcatattgtcgagtgtccaccgaccaagaagaacagctatcaagttatgaaaaccaagttaattattaccgagagtttatctccaaacacgaggactatgagttagttgacatctatgcggatgagggcatctcagcaaccaataccaaaaaacgtgatgcctttaaccgattgatacaagattgtagggctggtaaggtggataggattttggtcaagtcaatcagtcgatttgccagaaacacccttg

SEQ ID NO: 37429 - DNA, 260 bp, Unknown
  Description of Unknown: RightRegion for integrase C172 sequence
gtctttcctataaaaggtagaaaatatgaactgaaggttagaaaggagcacttcttatgaaaaacgtcataactattgaagcaaatgcgcctaggaactcagagttagctagcatttcgctacctaagaaacgtcgtgtagcaggttatgcgagggtatcaactgatcatgaagaccaaacaaccagctatgaatctcagatgaggtattatgcagaatacatttcaactcgaagcgattgggagtttgttaaaatgtac

SEQ ID NO: 37430 - DNA, 260 bp, Unknown
  Description of Unknown: RightRegion for integrase C173 sequence
agggttacaccagtaaaaggaaggaaatataccatagaaattagagaggggcgatattagtgaagaaagtaattactattgaggctacaccaactattattaggtcaagttcagatgatttcactttgaaaaagcgtagagttgcaggctatgctagggtatcaactgaccatgaagaccaagcaacaagctatgagtcacagatgcggtactactctgaatacattaatgggagggatgattgggaatttgttaaaatg

SEQ ID NO: 37431 - DNA, 260 bp, Unknown
  Description of Unknown: RightRegion for integrase C174 sequence
tgggttataccagtaaaaggaaggaaatatcctatagaaattagagaggggcgatattagtgaagaaagtaattactattgaggctacaccaagtattattaggtcaagttcagatgatttctctttgaagaagcgtagggttgcaggctatgccagggtatcaactgatcatgaagaccaagcaacaagctatgagtcgcagatgcggtattactcggaatacataaatgggagggatgattgggaatttgttaaaatg

SEQ ID NO: 37432 - DNA, 200 bp, Unknown
  Description of Unknown: RightRegion for integrase C175 sequence
attagccatgcatctgaacagatacaaatattgcaattaaaagcattagacaggtggtagaggtcttggtattatataatctttaggttctaaatttggaagggtggccgagcggctgaaggcggcggtttgctaaaccgttatacgacccaaaagtcgtatcgagggttcgaatccctctccttccgtatactgttttt

SEQ ID NO: 37433 - DNA, 260 bp, Unknown
  Description of Unknown: RightRegion for integrase A1 sequence
gagtggcgggggatgcggcgcatgcacgagcacagcgggaacgcgatgtttctgagttgagaggtccggggcgcgcctggccgcgcgaccccggtttgaggcgggccaaaaggcccacggacgggagcgaaaatgacacaagaacacaggctttacaactctgttgcgccgctgaggaacgtctcggcgctcgtgacactgatcgagaaggtgcgcgaccgcgcgcccggtttgccggggatggcgacattctcgggcta

SEQ ID NO: 37434 - DNA, 260 bp, Unknown
  Description of Unknown: RightRegion for integrase A2 sequence
gcgaaatccgcgaccgaagcccgccgccatatcgcgcatgaagagggcaaagccccggcgccagtcaacccgacggacaaggcgtatcaggcgcttgccgaggcttggaggcgggcgccggcggcggctcggcggcggttcctggaggagttcggccaggacgtgtcggagctgatgccgaagccggaggtcgccgccgaatgacgctgaccccgaccaaggaatggtggaccgccgccgaaatcgccgcccaggcactg

SEQ ID NO: 37435 - DNA, 260 bp, Unknown
  Description of Unknown: RightRegion for integrase A3 sequence
ggggcaggcccccgcgccgatgtcgccgaccgatcaagcctatacgcgtctgctcgacgcctgggaccgggcgccgaaggcggcgcgcaagcggttccttgaagggcggggcgatgccgtgcgcgaggtgctggacgatctggacgcggcttcgggcgctgagaacaccgtcaccttcctgccgcggagggacgagcgccatggctgagaccccgcgccaggaatggtggagcgcggccgagatcgccgcagcgggcctg

SEQ ID NO: 37436 - DNA, 260 bp, Unknown
  Description of Unknown: RightRegion for integrase A4 sequence
tcaagcaattgcaaaagaattagatgtaagcactgattacctcctaggcaattcgaattctacagtgtctgatgcacacgacctaaaaaagttcctagatcaaaacatgatattatttgacggtattccactgactgaggaagagatatctaggattaaaggatatcttgatgcactgatttctaggggaggtaagtaagatgttctctaattcccttgaggatttctttggtccggaagttgacatttatgcaagggta

SEQ ID NO: 37437 - DNA, 260 bp, Unknown
  Description of Unknown: RightRegion for integrase A5 sequence
aatttctgttatatatacaaaaaattattgcgacctacaagaaatacaagaattaaaacatattctatctcaaatgattatacataacttaaaaaacaaaaagaagaatgacgagtaatgttgtcattcttctttttttagattaatatttacatagataataaaatttatcgacaaagataataaaaagggtgagaaatatgtcagataaaaaacaagatatttatgctatttatattcgtgtatcaactgaacgacaa

SEQ ID NO: 37438 - DNA, 260 bp, Unknown
  Description of Unknown: RightRegion for integrase A6 sequence
agtggcgcgaagtggactggagccaggagaagcgcacccgcttcaccacgctgctcctgcgtcttctggcagaggatgacgaggacaccgaggagtgatagacggtggtccgactgtcacaaagtaggttagatttacatacagtcccacggaggcatcccggccaaggggtgcctccgttctgtgttaaggagacatcggtgagcaacactcttctgccggggcagagactgcgtcgtcgcatacgcgtcgccatctac

SEQ ID NO: 37439 - DNA, 260 bp, Unknown
  Description of Unknown: RightRegion for integrase A7 sequence
gcgggtggcgccgtgagcaacacgacctccgcctggaggacgagagagtggagcgaggccgagcgtgctcgcctcttccgtctcctcttcgggtcacaaacacagacgaaaactgggtgagtcaggtacactgacacaccgcacagcaacccctcgggctgatgctcggggggttcgtgcgttcaggggagggaagtgtcatggtgaagcgaactcttccgcgtcagcggatgaagcaggcgaccgtccgggtcgccatc

SEQ ID NO: 37440 - DNA, 260 bp, Unknown
  Description of Unknown: RightRegion for integrase A8 sequence
gcgggtggcgccgtgagcaacacgacctccgcctggaggacgagagagtggagcgaggccgagcgtgctcgcctcttccgtctcctcttcgggtcacaaacacagacgaaaactgggtgagtcaggtacactgacacactgcacagcaacccctcgggctgatgctcggggggttcgtgcgttcaggggagggaagtgtcatggtgaagcgaactcttccgcgtcagcggatgaagcaggcgaccgtccgggtcgccatc

SEQ ID NO: 37441 - DNA, 260 bp, Unknown
  Description of Unknown: RightRegion for integrase A9 sequence
agccagagccccatcgtcagcgtcgagtggcgcagaaccaagtggaccccggcccagcgcgagcgcctggcccgcatcctcctcgggccggtagcgaagaaggactgacccaggtacagttacatacggcgtgcacgcccctcgacccatgcggtcggggggcttcgtgcgtcctgctacctgagtccgaggggggacacatgcgaaccacgaccctgccgcgcaagcgcaagatgctgcgcgtcgccatctacctgcgc

SEQ ID NO: 37442 - DNA, 260 bp, Unknown
  Description of Unknown: RightRegion for integrase A10 sequence
ggtggcgccgtgagcaacacgacctccgcctggaggacgagagagtggagcgaggccgagcgtgctcgcctcttccgtctcctcttcgggtcacaaacacagacgaaaactgggtgagtcaggtacactgacacaccgcacagcaacccctcgggctgatgctcggggggttcgtgcgttcaggggagggaagtgtcatggtgaagcgaactcttccgcgtcagcggatgaagcaggcgaccgtccgggtcgccatctac

SEQ ID NO: 37443 - DNA, 260 bp, Unknown
  Description of Unknown: RightRegion for integrase A11 sequence
ccagaaccccatcgtcagcgtcgagtggcgcaaggccaggtggaccccggccgagcgcgaacgcctcgcccgcatcctcctcggacccgtcgccaagaaggactgacttcagctacagttacatacggcgcgagacgccccccgagccttctggccggggggcttcggcgtttctgtgtaagtggaactggagggggaccatgcgtaccaagacactgcctcgcaagaccaagacgctgcgggtggccatctacctgcgc

SEQ ID NO: 37444 - DNA, 260 bp, Unknown
  Description of Unknown: RightRegion for integrase A12 sequence
gaatatctgaatcattcgctggatattctggaacagaacagacgtaaaaaagccatttaattaacgtttaaacaaaatttaattacgaggttattcagatgaatatttccgatattcgcgcaggactgcgcacgcttgtagaaaatgaagaaaccacctttaaacaaattgctcttgagagcgggctttctaccggaactatcagtagttttatcaatgataagtacaacggggataacgagcgtgtttcacaaatgctg

SEQ ID NO: 37445 - DNA, 260 bp, Unknown
  Description of Unknown: RightRegion for integrase A13 sequence
gctgaattaaagaaacgaaaaatttcattacgttctttagggagacagaacggactttctcctcatacattaaaaaatgctttagataaatcctaccgaaatggcgaaatcattatcgcaaaggcgttgggaatgaagcctgaagatgtgtggccttcacgatatcaatcttttcataacgcagcttaagtgggtgggttatgactaattggtttacgacaaaagaattggttggacttccagggttgccagagcactct

SEQ ID NO: 37446 - DNA, 260 bp, Unknown
  Description of Unknown: RightRegion for integrase A14 sequence
gaatatctgaatcattcgctggatattctggaacagaacagacgtaaaaaagccatttaattaacgtttaaacaaaatttaattacgaggttattcagatgaatatttccgatattcgcgcaggactgcgcacgcttgtagaaaatgaagaaaccacctttaaacaaattgctcttgagagcggactttctaccggaactatcagtagttttatcaatgataagtacaacggggataacgagcgtgtttcacaaatgctg

SEQ ID NO: 37447 - DNA, 260 bp, Unknown
  Description of Unknown: RightRegion for integrase A15 sequence
gaatatctgaatcattcgctggatattctggaacagaacagacgtaaaaaagtcatttaattaacgttttaacaaaatttaattacgaggttattcagatgaatatttccgatattcgcgcaggactgcgcacgcttgtagaaaatgaagaaaccacctttaaacaaattgctcttgagagcgggctttctaccggaactatcagtagttttatcaatgataagtacaacggggataacgagcgtgttttacaaatgctg

SEQ ID NO: 37448 - DNA, 260 bp, Unknown
  Description of Unknown: RightRegion for integrase A16 sequence
ttcgagcaaggctggcggaaaggtcttgaaatgattaaacaggaaaagggcattaaataggagaaatcaaatgagcttaattaaccaaatcaatgcaattaaagcatcaggaaatattagtcaacgtgatattgcacagcaaattggcatttcagcaggtgcattgagtgcttatttaaagggtaattatgcaggcaatatcgacaacatcgagagtgcactcacgaactggcttgcgacacaagaaaagaaagaaaaag

SEQ ID NO: 37449 - DNA, 260 bp, Unknown
  Description of Unknown: RightRegion for integrase A17 sequence
gccttgagccagagccccatcgtcagcgtcgagtggcgcaagaccaagtggacccccgccgagcgggaacgcctcgcccgcatcctcctcgggccggtggcgagtaagacctgaccccaggtacagttgcacacggcgcctacgccccccgagccttctggccggggggtttcggcgtatctggatccaggagggggatcatgggagccaagacgctcgcccgcaagcgcaagaccctgcgagtcgccatctacctacgc

SEQ ID NO: 37450 - DNA, 260 bp, Unknown
  Description of Unknown: RightRegion for integrase A18 sequence
aagtacggattcaacgatgcgatggaaagacacctgaagaagttcaaaggcgaggcatgaaaaaacccgggagcggcaactcccgggctcaaagtggccctcaggccaatcactactcagaaaggcaaggataacacatgacaaaagagcagcgaaaaaccatgaaagccaaacgcaacgaagccctggcggatgccgtcgaacagatcattgccgatgagagcttgacccaggcctcggtttccaagctgaccaacatc

SEQ ID NO: 37451 - DNA, 260 bp, Unknown; identical to SEQ ID NO: 13144
  Description of Unknown: RightRegion for integrase A19 sequence

SEQ ID NO: 37452 - DNA, 260 bp, Unknown
  Description of Unknown: RightRegion for integrase A20 sequence
cagaacttcagccaaagcgtttcaaacctgtttgaacagaaattcaaaaacaagctttaaaccctatttaaaccttccataaatggagattgatatgagtacaaacgtagttgaactaggcaatgcagaggctaagcaaaccgacacattaatgcgcattcgtgcattaacagaatcgaaggctgtttcagcgtctcagattgcaaaagagatcagcgtatcacctgccacgctaagccaaattttgaacggttcataca

SEQ ID NO: 37453 - DNA, 260 bp, Unknown; identical to SEQ ID NO: 37452
  Description of Unknown: RightRegion for integrase A21 sequence

SEQ ID NO: 37454 - DNA, 260 bp, Unknown
  Description of Unknown: RightRegion for integrase A22 sequence
gaagatttaaatataagtttggacaatgataagcaagttgagtgtgttgtattgatgtaaaaagttgcacccactaagtaaataaagtgtagaaaataagggcttattctaaggctatcgttaaaaggtatcggtagcttggagtaagccttattagttgagagaaaataaggttgagtaggaacatatctatagatgagagttgacactagggaatggataacaagaaaaaatgcacccacttgcacccagctaaaaat

SEQ ID NO: 37455 - DNA, 260 bp, Unknown
  Description of Unknown: RightRegion for integrase A23 sequence
ccgaaggtcgaggaagagacggagccggagacgctgaacgggttcacagcggcggcgtgacggcggcaccagcgcaacgggaaggggcttcggccccttttctcgtgcccggcgtcggttcgttgccctaagcaactgttcctagcgtcacgtcagcgccggaccggcaggcttcccacctgggcaaagagacgtagtgacggagttacgtcacttctgaattcctataagacatctctataagcaatccggaagtgacg

SEQ ID NO: 37456 - DNA, 260 bp, Unknown
  Description of Unknown: RightRegion for integrase A24 sequence
atccattgggcaaagccgtctgaagacgcccaggaagagccggagacgctagcggcgtagctgggcacccccggagcctgtacggcgctcagacgggcgctcagcgggcttctcagggcagcgggaagggtcggccggatcgccggtcggccttctctcgtgtctcgtggtcgttagttagcctaagtaacagtgactccgtcaccacagcacagcggggcgccccgtctgacctgggcaaagtgatgaagtgacgtagt

SEQ ID NO: 37457 - DNA, 260 bp, Unknown
  Description of Unknown: RightRegion for integrase A25 sequence
ccgccgaccgacgacgacgaagacgacgcccaggacggcacggaagacgtagcggcgtagcgagacacccgggaagcctgttaggcgctgagacgggcgcacagcgggcttcctggggcagcgggaagggtcggccggtcccccggtcggcccatttctcttgtctcggtttagttagttagcctaagtaacagtgactccgtcaccacagcacagcggggcgagccgttgacctgggggaagtgatgctgtgacggaat

SEQ ID NO: 37458 - DNA, 260 bp, Unknown; identical to SEQ ID NO: 13018
  Description of Unknown: RightRegion for integrase A26 sequence

SEQ ID NO: 37459 - DNA, 260 bp, Unknown
  Description of Unknown: RightRegion for integrase A27 sequence
ctgctgaaggaggaagacgaagcgagcgaagccactgagcgggagcttgcggcgctgtagcgcacagcgggaggggtcgagccggcggacggttcggccccttttttggccttgaaatcgttagttaggctaactagtagttccttcgtcaccacagcgggcagggagcgcccttctgacctgggatgagtgacgtagtgacgaaatgactcatacctaggattcacataagcattctctataggtaatccggactcgac

SEQ ID NO: 37460 - DNA, 260 bp, Unknown
  Description of Unknown: RightRegion for integrase A28 sequence
aatacgaggccgccggtggaggagatggtgcgtatcgtgttcggtcctgtggggggatgatgggatggatttccccgcgccttgtggcttggggaaatccatccagggggttatgtgaaatctgttcgcagaatttcgcgttctggggtgcggttcagaacgagaccgtgatcagcaaaaattcgagttaatgaggcgatctcgccggcgttgaggtgttcacctatggcgtgggagatctcccgacaggtagtgccctc

SEQ ID NO: 37461 - DNA, 260 bp, Unknown
  Description of Unknown: RightRegion for integrase A29 sequence
ccgattgaagagcgcgtcacgatcgaatgggcgaagccggcggaggggtcagcggcgtaagcccacagcgggaagggggccgatccttcggggtcggtcctctttttgtgccttcggatcgttagttaggctaagtagttatcatcccgtgaccactcccctacacgagcccccttgagaatccccttcctgacctgggcttgtgcactagtgcagatttgtacttgatcttgataccaccatagaaaagctatagagaa

SEQ ID NO: 37462 - DNA, 260 bp, Unknown
  Description of Unknown: RightRegion for integrase A30 sequence
ccgattgaagaccgggtcaagatcgaatgggctaagccggcggaggggtcagcggcgtaggggcacagcgggaaggggtccgatccttcgggtcgggcctctttttgtgccttcggatcgttagttaggctaagtagttatgatcctgtgacactctcctgcacggcttcgcctgagaatcccctacctgacctgggctaatgctctagtgcagatttgtacttgatcttggaaacacaatagaaaagctatagagaaac

SEQ ID NO: 37463 - DNA, 260 bp, Unknown
  Description of Unknown: RightRegion for integrase A31 sequence
tcgcaacgcgtctcggccgaccagctcaccaacgccgataacgccggctacatgcgcgccctcgaccacgtcgcgcgcggcctgctcgacgtaccccccgcaccgcgccgcggtggcaaccgggaccgcgacgagcaggtcgcgggcaacgtgatcacactgcgcccgcacaaccccgaccgatgcgaacggaaggcacagtgagcactctgtatctaccgccccagtaccaggggccgccggatgccggcgacctctgg

SEQ ID NO: 37464 - DNA, 260 bp, Unknown
  Description of Unknown: RightRegion for integrase A32 sequence
gttccgattgaagagcgcgtcaagatcgaatgggcgaagccggcggagtcagcggcgtagcccaggacagcgggaaggggtccggtccttcggggtcggacctctttttgtgccttcaagtccttagttaggctaactagttatccttccgtgacactctcctacacgagcccccgtgggaatccccttcctgacctgggcttgtgcactagtgcagttttgtacttgatcttgataccaccttagaaaagctatagaga

SEQ ID NO: 37465 - DNA, 260 bp, Unknown
  Description of Unknown: RightRegion for integrase A33 sequence
ccggaaacggttgtgttccgcaatgggctgtcccatacattcacttataaggattcttaatgtaaaaatacccaggagcatttacactcctgggtttctctttgtcccattatttacttttcctgatttctgggataacctcacatttgttagatttggaggctacacaatcatcatagcatcccgtatgattacgggtgtaccaccatttctaacatttgttagatttttactggttctcggaatgctcatatgtattc

SEQ ID NO: 37466 - DNA, 260 bp, Unknown
  Description of Unknown: RightRegion for integrase A34 sequence
cataaagaaacccccacatgtggaggctattgtgttgctcatcaaatagtagcgaagtaaaaaagtgagacgcaaatttgagcgtctcactctttttttatttcaagatatcatttaaggactcagtgattgtaggatgagtatagatacgatcacacaacacacgataatcgagttttaaatccatggcaagcgttattaagttaatcatttcatgggattcaatcccaaagagagaagcaccaatgatttgatttgtg

SEQ ID NO: 37467 - DNA, 260 bp, Unknown
  Description of Unknown: RightRegion for integrase A35 sequence
agaggaaacttaaataacaaaataaatacccttttaatatacacagaaggcattctatagctaacttaagtaaccagatataactataacttttattgtttaataacatttgtgccattctctctaacttgagcttatggtttaaagtacttaatgaccaagagcataattattactacaaataggtggtcttaggctttcaagatgactatttactttcagcaaatcgtccaaatcatgctctattttttgtgttttta

SEQ ID NO: 37468 - DNA, 260 bp, Unknown
  Description of Unknown: RightRegion for integrase A36 sequence
cagatcaccgacgaccagctcgccgaagcgcaccaggccggctacgcgctggccctccaccacgttgcgcgcggcctgctcgtcccggacccggccccgccgacccccggccaccaccaggacgacgagcagaccccgggcaacgtggtgcaactgcaccgcagcccgaccaacacccccaaggagaaacggaaggcacagtgaccagcctgtacgtacccccggcgtccgccgccctgcgcggcgaactgccctgggtg

SEQ ID NO: 37469 - DNA, 260 bp, Unknown; identical to SEQ ID NO: 37468
  Description of Unknown: RightRegion for integrase A37 sequence

SEQ ID NO: 37470 - DNA, 260 bp, Unknown; identical to SEQ ID NO: 13741
  Description of Unknown: RightRegion for integrase A38 sequence

SEQ ID NO: 37471 - DNA, 260 bp, Unknown
  Description of Unknown: RightRegion for integrase A39 sequence
cagatcaccgacgaccagctcgccgaagcgcaccaggccggctacgcgctggcccttcaccacgttgcgcgcggcctgctcgtcccggacccggccccgccgacccccggccaccaccaggacgacgagcaggccccgggcaacgtggtgcaactccgccgcagcccgaccgacacccccaaggagaaacggaaggcacattgaccagcctgtacgtcccgccgtccttcacgggcggcccgccgcccgatgacctcccc

SEQ ID NO: 37472 - DNA, 260 bp, Unknown
  Description of Unknown: RightRegion for integrase A40 sequence
acgcggaatttcttacgggctggtttagctgcgctagccatgtcgataatcctgttgagtggtttctgtacggccatgatggcagagcgtaacttgctgtctcaacgaggttttgttgtcggaggaaggccagaccataaagggggcgatagcgggatcgcgcgcggggtaatcttcactccataaacggtggagggcagatgatacaggacacttttgtacgtcagagggcaaaacaactttactggcagggctacccg

SEQ ID NO: 37473 - DNA, 260 bp, Unknown
  Description of Unknown: RightRegion for integrase A41 sequence
gaccacgcgtaccgcgccggataccaccgcgcgctcacccacgtgtcacaaggacttctcgacgccccggcggcaccgccggacggcggcgaggaagtcgggcagtacgacgcgcagggcaacgccctatgcgacgacgacctgctcgacaatgtgcggccactccggccgcacggaaacgccaacccacggaaagcggtatgaaactagacataccaagcacattccacggctcgcgcacatttggcgagccgtggctc

SEQ ID NO: 37474 - DNA, 260 bp, Unknown
  Description of Unknown: RightRegion for integrase A42 sequence
cacgagagggtcaagatcgagtggcatcggcccacggaggaggtagacctggtggcgtaggccacactgtacacacgagagggtctctgctcacatgagcgggggccctttcttcttgccctttaggtcacggaacggtaacggccccgtgggcccgggtgacgttcggcggggccgatgacgctcagcgggcggggacggggctcccgcaccccctctgacctgcaagaatgatggcagtgacgattgagatagtgatc

SEQ ID NO: 37475 - DNA, 260 bp, Unknown
  Description of Unknown: RightRegion for integrase A43 sequence
gacccgacacccatagaagaccgactcattttcgattggctgagcggggtgccagcgtgactacgcgaacgtgttaccggtgcaaggaagtcaagccgctggaagagttcccccgggcggcaagcaagcccaaagggcatgactacctgtgtaagccgtgcaaggtggtggttgagtctgagcggaagcgacagacgccgggcttgcaggcggaagcgtcccgggctcagcgggcaggcatcaggctcaacaagtgcgct

SEQ ID NO: 37476 - DNA, 260 bp, Unknown
  Description of Unknown: RightRegion for integrase A44 sequence
cgcctcgccctcgaacacgtcgctaagggcctgctcagcaggaaatccgcaccgcccgacggcgggacacgcgtcgagccagtcgacgaccgcgcgaccctcgaccccgacctcggcggcggagccgcgggccccgttgtccccagcaacgtgcgcccgctccggctcatccgccacgaccacgacgaacggaagatcgtatgacccttcccgacatcccacccacgttccacggctcggcgcacgccggcgagccgtgg

SEQ ID NO: 37477 - DNA, 260 bp, Unknown
  Description of Unknown: RightRegion for integrase A45 sequence
ctcgccctcgaacacgtcgctaagggcctgctcagcaggaaatccgccccgccggacggcgggacgcacgtcgagccggtcgccgaccgcgccactctcgacggcgaccgcgccgccggcggaaccgcggggcccgttgtccccaacaacgtgcacccgctgaggctcatccgcccagaccacgacgaacggaagatcgtatgacccttcccgacatccccgctacgttccacggttcgcccctcgcgggcgagccgtgg

SEQ ID NO: 37478 - DNA, 260 bp, Unknown
  Description of Unknown: RightRegion for integrase A46 sequence
aatcaactaaaaaggctgtgaaacagctcctagagttaaatttaataaataatgttgaagatctatttaaaggtcagtatgaaccaggtactttagaggaattattaattacagctttaaaagcagatatatcatatttactcaataatgaaaaataaagtttttttatttataaatatagtatgaaagggatgttaaatgtgaagaaatcagctatatacataagagtttccacgcatcatcaaatcgataaggattcg

SEQ ID NO: 37479 - DNA, 260 bp, Unknown
  Description of Unknown: RightRegion for integrase A47 sequence
gacctcgatccctcgctcatcccaagcgacgggctgccgatgcttcctctcgacgcctgatactctcgcctaggcgggtcgttcgaccaagctggttcgccagtcgccaacgaacccgaaggtaggtgctggcttcgattccgaaaaccagaaatccgtgaaagcagcgacgtctggcgcaaggtaccaatacgcgtgcccgtcagcatccatagcccaccatcgagcgcttttcggcgcctgcttccagtcgatctcag

SEQ ID NO: 37480 - DNA, 260 bp, Unknown
  Description of Unknown: RightRegion for integrase A48 sequence
ccgagggatgacgacatgagaggggccctcggaatgacaggagcccccctggccgattagaggtcaaccagggaggcgtgcaaccacacggatctaaggagcagttgcatggcaatcgtaaccccgtcgcgtgcggcgacggcaggcacaatcgcggtcggtgggctctcgttcgcgctgtcgttcacggcgctgagagagctgtcggcggccaacggagtggcccaggcatggatggtgcccctggtggtcgacggagg

SEQ ID NO: 37481 - DNA, 260 bp, Unknown
  Description of Unknown: RightRegion for integrase A49 sequence
agttacgaatgaagaatatataaatactcgcgaagattttaaaagttttaaattggcattagagcaacttataaatctaaaaatgattacttcagctgaagatttatttaaggattttaaaggtaatgcagctgaggaattgcttgttgctgcacttaaagctgatgttgaaggtataatgttaaaaaaggagaatacaaatgaaaaagatgaaaattaaaatagcaatctatgtaagggtatccacacaccatcaagta

SEQ ID NO: 37482 - DNA, 260 bp, Unknown
  Description of Unknown: RightRegion for integrase A50 sequence
aacgagttcttcgcccagggcgctgaagagcttgagggcatcgcacgcgccgaagcgtgacagcggaaggggtcgttccttcgggggcgaccccatttcgtgcgccttgagattgttagttaggctaactagtagttccttcgtcacgacagcgggcagggatcaggcttctgacctgggagaagtgatgttgtgacgctgtgatccaaactcaggattcacataagagcttctataggcaatccggatcttgagccact

SEQ ID NO: 37483 - DNA, 260 bp, Unknown; identical to SEQ ID NO: 24467
  Description of Unknown: RightRegion for integrase A51 sequence

SEQ ID NO: 37484 - DNA, 260 bp, Unknown
  Description of Unknown: RightRegion for integrase A52 sequence
aggctcaggtcatctgcgtgtgctcgcgaaaccgcactgagcatcatcgcaaattcgactttcactgcacggcgccacgcggcgccgtttttttatgcccggctttcgcgcgcggagaaatatacattcgttgtgtcaggggcagcctagtgatatgaaatgtatacttttcgcttttgtcatgttactcaggcagcaccgtgcaggaaaaacccaaagtttacagctacttacgtttcagcgatccgaagcaagctact

SEQ ID NO: 37485 - DNA, 260 bp, Unknown
  Description of Unknown: RightRegion for integrase A53 sequence
ccgagggatgacgacatgagaggggccctcggaatgacaggagcccccctggtcgattagaggtcaaccagggaggcgtgcaaccacacggatctaaggagcagttgcatggcaatcgtaaccccgtcgcgtgcggcgacggcaggcacaatcgcggtcggtgggctctcgttcgcgctgtcgttcacggcgctgagagagctgtcggcggccaacggagtggcccaggcatggatggtgcccctggtggtcgacggagg

SEQ ID NO: 37486 - DNA, 260 bp, Unknown
  Description of Unknown: RightRegion for integrase A54 sequence
ccgaaggacgttcggactcgcctggtcattcggccagacgacttcggacagaccttctgagaacgcaaaaagcccccagtcgatgagtgactgggggctctgcgttacagcttgctcgggtcgtacgggatctcctcgtcaccgtcgatgatgacgacctcgatctcgatcacggggcgacgcgaccgtgccgctggaacgcgccccaggtgaggggcatgtcctgatggaggaagtcctccatcttctcggcggccatc

SEQ ID NO: 37487 - DNA, 260 bp, Unknown
  Description of Unknown: RightRegion for integrase A55 sequence
ccgaaggacgttcggactcgcctggtcatacggccagacgacttcggacagaccttctgagaacgcaaaaagcccccagtcgatgagtgactgggggctctgcgttacagcttgctcgggtcgtacgggatctcctcgtcaccgtcgatgatgacgacctcgatctcgatcacgggccgacgcgaccgtgccgctggaacgcgccccaggtgaggggcatgtcctgatggaagaagtcctccatcttctcggcggccatc

SEQ ID NO: 37488 - DNA, 260 bp, Unknown; identical to SEQ ID NO: 25647
  Description of Unknown: RightRegion for integrase A56 sequence

SEQ ID NO: 37489 - DNA, 260 bp, Unknown
  Description of Unknown: RightRegion for integrase A57 sequence
gaccacgcgtaccgcgccggataccaccgcgcgcttacccacgtgtcacaaggacttctcgacgccccggcggcaccgccggacggcggcgaggaagtcgggcagtacgacgcgcagggcaacgccctatgcgacgacgacctgctcgacaatgtgcggccactccggccgtatgaaaacaccaacccacggaaagcggtatgaaactagacataccaagcaccttccacggctcgcgcacattcggcgagccgtggctc

SEQ ID NO: 37490 - DNA, 260 bp, Unknown
  Description of Unknown: RightRegion for integrase A58 sequence
ccgaaggacgttcggactcgcctggttattcggccagacgacttcggacagaccttctgagaacgcaaaaagcccccagtcgatgagtgactgggggctctgcgttacagcttgctcgggtcgtacgggatctcctcgtcaccgtcgatgatgacgacctcgatctcgatcacggggcgacgcgaccgtgccgctggaacgcgccccaggtgaggggcatgtcctgatggaagaagtcctccatcttctcggcggccatc

SEQ ID NO: 37491 - DNA, 260 bp, Unknown
  Description of Unknown: RightRegion for integrase A59 sequence
ccgaaggacgttcggacacgcctggtcatccggccagacgacttcggacagaccttctgagagaacgcaaaaagcccccagtcgatgagtgactgggggctctgcgttacagcttgctcgggtcgtacgggatctcctcgtcaccgtcgatgatgacgacctcgatctcgatcacggggagacgcggccgtgccgcatgaaggcggaccaggtgatgggcatcgcgtcggcgaagacctcctccatctcgtcggccacca

SEQ ID NO: 37492 - DNA, 260 bp, Unknown
  Description of Unknown: RightRegion for integrase A60 sequence
ccgaaggacgttcggacccgcctggtcattcggccagacgacttcggacagaccttctgagacaacgcaagaagcccccagtcgagaggtgactgggggcttcgttgttagagcttgctcgggtcgtacgggatctcctcgtcaccgtcgatgatgacgacctcgatctcgatcacggggccactcggccgtgccgctggaacgcgccccaggtgtggggcatgtcgtgctggaagtagtcctccatcttctcggcggcc

SEQ ID NO: 37493 - DNA, 260 bp, Unknown
  Description of Unknown: RightRegion for integrase A61 sequence
agccctcctggatttataaagtatttacaatgaatttagatgaactaattataacccatgttcaagaaggtttttcataaaatttcaatcaattcaattccttcaaattattgtattgttttcgtattcaatgtcagataaaatattcttaattaagtttctgttttgacattaaacacaaataaagaggtgctaaatttttggagttaaaaaacattgttaattcttacaacatcacaaatattttagggtatcttaga

SEQ ID NO: 37494 - DNA, 260 bp, Unknown
  Description of Unknown: RightRegion for integrase A62 sequence
caaccgaaagcggaccaaccccagccctcatttcaacttcaactttttggttcacagaatgattgagccaaagcaccgcgacgcatggaaggccagacgatgacgcacgccgatccacggttacttgcatttgtccgagctttggcgaaagctgatgcgcgtcgcgatagggcgctggcagcggcaaatagtgaggaagtatgcaaaacaacagagcagccatttatgcgaggttctcaactgatctccaaaacgagcgg

SEQ ID NO: 37495 - DNA, 260 bp, Unknown
  Description of Unknown: RightRegion for integrase A63 sequence
ccctgggcggaggagccggacgccggggaggactacggcggggagacagcggcagagtgagtatttattgagaattgtttgaccttctaatccagctatacgcctcctctcctcctctctacagcgtcaccagccaggtcaaacagttctccttatcgcccctcaccaggggaggttctctccggacccccaggtgaggggcgacgtgcgtcccagggaggagacacccccgatgacctacgaagaggagtgcgcacact

SEQ ID NO: 37496 - DNA, 260 bp, Unknown
  Description of Unknown: RightRegion for integrase A64 sequence
ccgaaggacgtgcgtcagcgcctggtcatccggccggacgactttggcgacacgttctgacccagaacgcacgaaagcccccagtcgagtgatgactgggggcttcgttgttagagcttgctcgggtcgtacgggatctcctcgtcaccgtcgatgatgacgacctcgatctcgatcacggggccactcggccgtgccgctggaacgcgccccaggtgtggggcatgtcgtgctggaagtagtcctccatcttctcggcg

SEQ ID NO: 37497 - DNA, 260 bp, Unknown
  Description of Unknown: RightRegion for integrase A65 sequence
ccgaaggacgtgcgtcagcgcctggtcatccggccggacgacttcggcgacacgttctgacccagaacgcacgaaagcccccagtcgagtgatgactgggggcttcgttgttagagcttgctcgggtcgtacgggatctcctcgtcaccgtcgatgatgacgacctcgatctcgatcacggggccactcggccgtgccgctggaacgcgccccaggtgtggggcatgtcgtgctggaagtagtcctccatcttctcggcg

SEQ ID NO: 37498 - DNA, 260 bp, Unknown
  Description of Unknown: RightRegion for integrase A66 sequence
ccgaaggacgtgcgtcagcgcctggtcatccggccggacgacttcggcgacacgttctaacccagaacgcacgaaagcccccagtcgagtgatgactgggggcttcgttgttagagcttgctcgggtcgtacgggatctcctcgtcaccgtcgatgatgacgacctcgatctcgatcacggggccactcggccgtgccgctggaacgcgccccaggtgtggggcatgtcgtgctggaagtagtcctccatcttctcggcg

SEQ ID NO: 37499 - DNA, 260 bp, Unknown
  Description of Unknown: RightRegion for integrase A67 sequence
tctcctgtctggcgtacgactgccggacgcggcgagcctcagctctctgccgttcagtgaagctgggcatggtggcccgagcctgagccacccactcctctcgggtcacccgatccgctcctcgttgagcatccggctgatctcgtcgcggaggtgatcgttctcggctgcctcacggaggagcaggaggcggaggtcaccgatgactccttgcgcccacacggggagcttcttcgtgcgctcggagtcgaacagcttgg

SEQ ID NO: 37500 - DNA, 260 bp, Unknown
  Description of Unknown: RightRegion for integrase A68 sequence
ataaaattcattccatagttctagatgaaaatagatataaacgtattagatctgcattaatgaaaaaggaagtctcatataatagttgtgaaatatagtattttccctactactttttaataaatatatgtagttatactcaattaacttaacttatttataaaactacaatcaatgtataaacactttggaggtatactatgaaagcagctatttattcaagaaaatcaaaattcactggtaaaggtgaaagtgtagaa

SEQ ID NO: 37501 - DNA, 260 bp, Unknown; identical to SEQ ID NO: 37497
  Description of Unknown: RightRegion for integrase A69 sequence

SEQ ID NO: 37502 - DNA, 260 bp, Unknown
  Description of Unknown: RightRegion for integrase A70 sequence
gccaatggcaagcgcgccattgtcaccctgcgcgccggaaagtggcgcgccgaaccctgaaggactgtctatgtattacgaaaacaagtcgtatcttatcggatgcttggggcaggaccccgagattcggacattccagaacggcggcaaggtggcgaacctgcgcattgccaccacccgccggtggaagtccaagaacacgggcgaggtgcaggaagaaaccgaatggcattcggtcgctgtgaccaatgaggcccttg

SEQ ID NO: 37503 - DNA, 260 bp, Unknown
  Description of Unknown: RightRegion for integrase A71 sequence
gccaatggcaagcgcgccattgtcaccctgcgcgccggaaagtggcgcgccgaaccctgaaggactgtctatgtattacgaaaacaagtcgtatcttatcggatgcttggggcaggaccccgagattcggacattccagaacggcggcaaggtggcgaacctgcgcattgccaccacccgccggtggaagtccaagaacacgggcgaggtgcaggaagaaaccgaatggcattcggtcgttgtgaccaatgaggcccttg

SEQ ID NO: 37504 - DNA, 260 bp, Unknown
  Description of Unknown: RightRegion for integrase A72 sequence
caaattgttgcagttatagcgaacggagaagaaggatcgttgaagcgcatgagatggagcgaaggttctccatatatagaattaataccggaaaattccgaatataatattatgagacatctccctcatgaaatcatagtctgcggagtgtatgtgggacactttaaaccagactttagagcagataaggagtcttgaaaatgagtaatgaatattgtatgtatcttcggaaatcacgagctgatgcagaggcggaagcg

SEQ ID NO: 37505 - DNA, 260 bp, Unknown
  Description of Unknown: RightRegion for integrase A73 sequence
ctgaggctgggcgcggctctatacctcgtaaacgcagaaaagccccctacgggccgctagggctcgcagagggcttctccggtagtctctattcagttgtactgctgagtccgtcagcgtgggcgctagaggggtttatggggcctcgtggacccgcacgtacggctgcagaggcttgtcacggtaggcgtggtagcgctctttctcgtcggagatcgacttgagaagctcgctgtcgatatgctcccgcacgaccttca

SEQ ID NO: 37506 - DNA, 260 bp, Unknown
  Description of Unknown: RightRegion for integrase A74 sequence
tacgagcagcatctcaggctcggtagcgtggtcgaacggctacacgccgggatgtcgtagagcgactaccccgagaacgcagaaaagccccctacgcgccgtgtaagggcacgcagagggctctctggtagtctctattcagttgtggggttgcgtccgtcagcgtggacgctagaggggtttacggggcctcgtggatccgtacgtacggctgcagaggcttgtcacggtaggcgtgatagcgctcggcctcctcgacg

SEQ ID NO: 37507 - DNA, 260 bp, Unknown
  Description of Unknown: RightRegion for integrase A75 sequence
tacgagcagcatctcaggctcggcagcgtggtcgaacggctacacaccgggatgtcgtagagcggctacccggagaacgcagaaaagccccctacgcgccgtgtaagggcacgcagagggctctctggcagtctctattcagttgtggggttgcgtccgtcagcgtggacgctagagggtatttcggggtggtgcagcatgtccggtgacttgtccgagtagcagatggagctgcctaggtgagcaacccatcgaaaccc

SEQ ID NO: 37508 - DNA, 260 bp, Unknown; identical to SEQ ID NO: 37507
  Description of Unknown: RightRegion for integrase A76 sequence

SEQ ID NO: 37509 - DNA, 260 bp, Unknown
  Description of Unknown: RightRegion for integrase A77 sequence
ctgaggctgggctcggctctagacctcgtaaacgcagaaaagccccctacgggccgctagggcacgcagagggctctctggtagtctctattcagttgtactgctgagtccgtcagcgtggacgctagaggggtttacggggcctcgtggacccgcacgtacggctgcagaggcttgtcacggtaggcgtggtagcgctcggcctcctcggcgcggatggcctcgatctcctgagccgcgctcaccttacgacgctgcag

SEQ ID NO: 37510 - DNA, 260 bp, Unknown
  Description of Unknown: RightRegion for integrase A78 sequence
tacgagcagcatctcaggctcggcagcgtggtcgaacggctacacaccgggatgtcgtagagcggctaccccgagaacgcagaaaagccccctacgcgccgtgtaagggcacgcagagggctctctggtagtctctattcagttgtggggttgcgtccgtcagcgtggccgctagagggggtttacggggcctcgtggacccgcacgtacggctgcagaggcttgtcacggtaggcgtgatagcgctccgcctcctcggc

SEQ ID NO: 37511 - DNA, 260 bp, Unknown
  Description of Unknown: RightRegion for integrase A79 sequence
ctgaggctgggctcggctctggacctcgtaaacgcagaaaagccccctacgggccgctagggctcgcagagggcttctccggtagtctctattcagttgtgggtgtgcgtccgtcagcgtggacgctagaggggtttacggggcctcgtggacccgcacgtacggctgcagaggcttgtcacggtaggcgtggtatcgctcggcctcctcggcgcggatggcctcgatctcctgagccgcgctcaccttacgacgctgca

SEQ ID NO: 37512 - DNA, 260 bp, Unknown
  Description of Unknown: RightRegion for integrase A80 sequence
cccagcgatgtgcgtgagcgcctggtcatgcggcgcgacgacttcgccgaggcgttctgagacacaacgcaaaaagcccccgtcctcgaagtgaggcgggggcttttcgttgttgggttacagcagctcggggtcgtaggggatgcggttgccgtcctggtcgatgatccagacgcgaacggtgatcacggggcgacgcgaccgtgacgctggaacgcaccccaggtgaggggcatgtcctggtggaagaagtcctccat

SEQ ID NO: 37513 - DNA, 260 bp, Unknown
  Description of Unknown: RightRegion for integrase A81 sequence
ccgaaggacgtgcgtgagcggctgatcgttcgagaggatgacttcgccgagacgttctgatccacaacgcaagaagcccccgtcctcgaagatgaggcgggggcttcgttgtgcgctacagcagctcggggtcgtactcgatccgttcaccgtcttcggtgacgatccagacgcggatctcgatcacggggctacccgcccgttcatctcgaaggcgaggtgagtgaccggcatcgtgtcgatgaaggcgacctccatct

SEQ ID NO: 37514 - DNA, 260 bp, Unknown
  Description of Unknown: RightRegion for integrase A82 sequence
actcctgtctggcgtaagcgaggcgacgtcgccggatcgactccctctgctgcggagtgacgggcggggctgaggctcgggccttggccacccactcctcgcgggtcactcggcacgctcccgttcgagcaggcgactgatgtcctcgcggaggtagtcgttctcggtggcttcccgaaggaggagcatccggaggtcggtgatcacggcccgagcccagaccgggagcttgtccagccgctcggactcgaacagcttgg

SEQ ID NO: 37515 - DNA, 260 bp, Unknown
  Description of Unknown: RightRegion for integrase A83 sequence
tacgagcagcatctcaggctcggcagcgtggtcgaacagctacacgccgggatgtcgtagagcggctacccgagaacgcagaaaagccccctacgcgccgtgtaagggcacgcagagggctctctggtagtctctattcagttgtgaggtcgcgtccgtcgcgtggacgctagaggggtttacggggcctcgtggacccgcacgtacggctgcagaggcttgtcacggtaggcgtggtatcgctcggcctcctcggcgcg

SEQ ID NO: 37516 - DNA, 260 bp, Unknown
  Description of Unknown: RightRegion for integrase A84 sequence
tacgagcagcatctcaggctcggcagcgtggtcgaacagctacacaccgggatgtcgtagagcggctacccgagaacgcagaaaagccccctacgcgccgtgtaagggcacgcagagggctctctggtagtctctattcagttgtggggttgcgtccgtcagcgtggacgctagaggggtttacggggcctcgtggacccgcacgtacggctgcagaggcttgtcacggtaggcgtgatagcgctcggcctcctcggcgc

SEQ ID NO: 37517 - DNA, 260 bp, Unknown
  Description of Unknown: RightRegion for integrase A85 sequence
tacgagcagcacctccggctcggtagcgtggtcgaacagctacacaccgggatgtcgtagagcgactacccggagaacgcagaaaagccccctacgcgccgtgtaagggcacgcagagggctctctggtagtctctattcagttgtggggttgcgtccgtcagcgtggccgctagagggggtttacggggcctcgtggacccgcacgtacggctgcagaggcttgtcacggtaggcgtgatagcgctccgcctcctcggc

SEQ ID NO: 37518 - DNA, 260 bp, Unknown
  Description of Unknown: RightRegion for integrase A86 sequence
tacgagcagcatctcaggctcggcagcgtggtcgaacggctacacaccgggatgtcgtagagcggctacccggagaacgcagaaaagccccctacgcgccgtgtaagggcacgcagagggctctctggcagtctctattcagttgtggggttgcgtccgtcagcgtggacgctagaggggtttacggggcctcgtggatccgtacgtacggctgcagaggcttgtcacggtaggcgtgatagcgctcggcctcctcgacg

SEQ ID NO: 37519 - DNA, 260 bp, Unknown
  Description of Unknown: RightRegion for integrase A87 sequence
tacgagcagcatctcaggctcggcagcgtggtcgaacggctacacgccgggatgtcgtagagcggctacccgagaacgcagaaaagccccctacgcgccgtgtaagggcacgcagagggctctctggtagtctctattcagttgtgggtgtgcgtccgtcagcgtggacgctagaggggtttacggggcctcgtggacccgcacgtacggctgcagaggcttgtcacggtaggcgtggtagcgctcggcctcctcggcgc

SEQ ID NO: 37520 - DNA, 260 bp, Unknown
  Description of Unknown: RightRegion for integrase A88 sequence
tacgagcagcatctcaggctcggcagcgtggtcgaacggctacacaccgggatgtcgtagagcggctacccgagaacgcagaagagccccctacgcgccgtgtaagggcacgcagagggctctctggtagtctctattcagttgtggggttgcgtccgtcagcgtggacgctagaggggtttacggggcctcgtggacccgcacgtacggctgcagaggcttgtcacggtaggcgtggtagcgctcggcctcctcggcgc

SEQ ID NO: 37521 - DNA, 260 bp, Unknown
  Description of Unknown: RightRegion for integrase A89 sequence
tacgagcagcatctcaggctcggcagcgtggtcgaacagctacacgccgggatgtcgtagagcggctacccccgagaacgcagaaaagccccctacgcgccgtgtaagggcacgcagagggctctctggtagtctctattcagttgtggggttgcgtccgtcagcgtggatgctagaggggtttacggggcctcgtggacccgcacgtacggctgcagaggcttgtcacggtaggcgtgatagcgctccgcctcctcggc

SEQ ID NO: 37522 - DNA, 260 bp, Unknown
  Description of Unknown: RightRegion for integrase A90 sequence
tacgagcaacatctcaggctcggcagcgtggtcgaacggctacacaccgggatgtcgtagagcggctacccgagaacgcagaaaagccccctacgcgccgtgtaagggcacgcagagggctctctggtagtctctattcagttgtgtggttgcgtacgtcagcgtggacgctagaggggtttacggggcctcgtggacccgtacgtacggctgcagaggcttgtcacggtaggcgtgatagcgctccgcctcctcggcgc

SEQ ID NO: 37523 - DNA, 260 bp, Unknown
  Description of Unknown: RightRegion for integrase A91 sequence
tacgagcagcatctcaggctcggcagcgtggtcgaacggctacacgccgggatgtcgtagagcggctacccgagaacgcagaaaagccccctacgcgccgtgtaagggcacgcagagggctctctggtagtctctattcagttgtggggttgcgtccgtcagcgtggacgctagaggggtttacggggcctcgtggacccgtacgtacggctgcagaggcttgtcacggtaggcgtggtaacgctcggcctcctcggcgc

SEQ ID NO: 37524 - DNA, 260 bp, Unknown
  Description of Unknown: RightRegion for integrase A92 sequence
tacgagcagcatctcaggctcggcagcgtggtcgaacggctacacaccgggatgtcgtagagcggctacccccgagaacgcagaagagccccctacgggccgctagggctcgcagagggcttctccggtagtctctattcagttgtgggtgtgcgtccgtctccgtggacgctagaggggtttacggggcctcgtggacccgcacgtacggctgcagaggcttgtcacggtaggtgtggtagcgctcggcctcctcggcg

SEQ ID NO: 37525 - DNA, 260 bp, Unknown
  Description of Unknown: RightRegion for integrase A93 sequence
tacgagcagcatctcaggctcggcagcgtggtcgaacagctacacaccgggatgtcgtagagcggctacccccgagaacgcagaagagccccctacgcgccgtgtaagggcacgcagagggctctctggtagtctctattcagttgtggggctgcgtccgtcagcgtggacgctagaggggtttacggggcctcgtggacccgtacgtacggctgcagaggcttgtcacggtaggcgtggtatcgctcggcctcctcggc

SEQ ID NO: 37526 - DNA, 260 bp, Unknown
  Description of Unknown: RightRegion for integrase A94 sequence
tacgagcagcatctcaggctcggcagcgtggtcgaacggctacacgccgggatgtcgtagagcggctgcccccgagaacgcagaaaagccccctacgcgccgtgtaagggcacgcagagggctctctggtagtctctattcagttgtggggttgcgtccgtcagcgtggacgctagaggggtttacggggcctcgtggacccgcacgtacggctgcagaggcttgtcacggtaggcgtgatagcgctccgcctcctcggc

SEQ ID NO: 37527 - DNA, 260 bp, Unknown
  Description of Unknown: RightRegion for integrase A95 sequence
actcctgtctggcgtgcgacagccgacgcttctgcatcgaccgacgctggttctcggtaacgggcggggcagtcgccctggcggcggccacccactctgctcgggtcacgtgccgacgaccgtcccgtcctcgtacagccggtagagctcggcgcccttgtcgagctgcgcctcggcccacgcacggatgtcccacgcctgccgggagttgcccaggcggccgaggaagatgcggcgcggggtcgagctctgcaaggagg

SEQ ID NO: 37528 - DNA, 260 bp, Unknown
  Description of Unknown: RightRegion for integrase A96 sequence
ccgaaggacgttcggacccgcctggtcatacggccagacgacttcggacagaccttctgagacaacgcaagaagcccccagtcgagaggtgactgggggcttcgttgttacagcttgctcgggtcgtaggggatctcgtcgtcaccgtcgatgatgacgacctcgatctcgatcacggggcgacgcggccgtgccgcatgaaggcggaccacgtgaggggcatcgcgtcggcgaagacctcctccatctcgtcggccacc

SEQ ID NO: 37529 - DNA, 260 bp, Unknown
  Description of Unknown: RightRegion for integrase A97 sequence
ccgaaggacgttcggacccgcctggtcatacggccagacgacttcggacagaccttctgagacaacgcaagaagcccccagtcgagaggtgactgggggcttcgttgttacagcttgctcgggtcgtaggggatctcgtcgtcaccgtcgatgatgacgacctcgatctcgatcacggggagacgcggccgtgccgcatgaaggcggaccacgtgaggggcatcgcgtcggcgaagacctcctccatctcgtcggccacc

SEQ ID NO: 37530 - DNA, 260 bp, Unknown
  Description of Unknown: RightRegion for integrase A98 sequence
ccgaaggacgttcggacccgcctggtcattcggccagacgacttcggacagaccttctgagaacgcaaaaagcccccagtcgatgagtgactgggggctctgcgttacagcttgctcgggtcgtacgggatctcctcgtcaccgtcgatgatgacgacctcgatctcgatcacggggcgacgcgaccgtgccgctggaacgcgccccaggtgaggggcatgtcctgatggaggaagtcctccatcttctcggcggccatc

SEQ ID NO: 37531 - DNA, 260 bp, Unknown
  Description of Unknown: RightRegion for integrase A99 sequence
ccgaaggacgttcggacccgcctggtcatacggccagacgacttcggacagaccttctgagacaacgcaagaagcccccagtcgagaggtgactgggggcttcgttgttacagcttgctcgggtcgtaggggatctcgtcgtcaccgtcgatgatgacgacctcaatctcgatcacggggagacgcggccgtgccgcatgaaggcggaccacgtgaggggcatcgcgtcggcgaagacctcctccatctcgtcggccacc

SEQ ID NO: 37532 - DNA, 260 bp, Unknown
  Description of Unknown: RightRegion for integrase A100 sequence
ccgaaggacgttcggacccgcctggtcattcggccagacgacttcggacagaccttctgagaacgcaaaaagcccccagtcgatgagtgactgggggctctgcgttacagcttgctcggttcgtacgggtactcgtcgtcaccgtcgatgatgacgacctcgatctcgatcacggggcgacgcgaccgtgccgctggaaggctgcccaggtctcgggcatgtcgtgctggaagaagtcctccatcagctcggcggccatc

SEQ ID NO: 37533 - DNA, 260 bp, Unknown
  Description of Unknown: RightRegion for integrase A101 sequence
tacgagcagcatctcaggctcggcagcgtggtcgaacagctacacaccgggatgtcgtagagcggctacccccgagaacgcagaagagccccctacgggccgctagggctcgcagagggcttctccggtagtctctattcagttgtgggtgtgcgtccgtctccgtggacgctagaggggtttacggggcctcgtggacccgcacgtacggctgcagaggcttgtcacggtaggtgtggtagcgctcggcctcctcggcg

SEQ ID NO: 37534 - DNA, 260 bp, Unknown
  Description of Unknown: RightRegion for integrase A102 sequence
actcgaaattcagagagacaaaattatccctttaatataaaatttgagttctttgattgatctatatacagctttaattttgtttaatttgtctatatatagcatttaaatctaaataaaattcccattttatttagatctgaaagtggcttgattgcataccaaatataaggtaccctgtatatgtatcataggggtttaacagccactataactccagagagctccctcacatagctctctggtttttttaatttata

SEQ ID NO: 37535 - DNA, 260 bp, Unknown
  Description of Unknown: RightRegion for integrase A103 sequence
gaacatgccaaacatgaacatcagtgataacgcttgatatacctccatattctcacccccttccctatcgggataaaagagagtgagccgaccacccttgagagagcctagtcaattgtacatggctattgtaacatgaaaaattttactattctctacttttctacaaccatgtgtataatggacggagaggtgatttgatgactagacctacaaaccttgacgtgattatccatctacggaaaagccgaaaagatatt

SEQ ID NO: 37536 - DNA, 260 bp, Unknown
  Description of Unknown: RightRegion for integrase A104 sequence
tacgagcagcatctcaggctcggcagcgtggtcgaacgactacacgccgggatgtcgtagagcggctacccgagaacgcagaaaagccccctacgcgccgtgtaagggcacgcagagggctctctggtagtctctattcagttgtggggttgcgtccgtcagcgtggacgctagaggggtttacggggcctcgtggacccgcacgtacggctgcagaggcttgtcacggtaggcgtggtagcgctcggcctcctcggcgc

SEQ ID NO: 37537 - DNA, 260 bp, Unknown
  Description of Unknown: RightRegion for integrase A105 sequence
tacgagcagcatctcaggctcggcagcgtggtcgaacagctacacgccgggatgtcgtagagcggctacccgagaacgcagaaaagccccctacgcgccgtgtaagggcacgcagagggctctctggtagtctctattcagttgtggggttgcgtccgtcagcgtggatgctagaggggtttacggggcctcgtggacccgcacgtacggctgcagaggcttgtcacggtaggcgtggtatcgctcggcctcctcggcgc

SEQ ID NO: 37538 - DNA, 60 bp, Unknown
  Description of Unknown: RightRegion for integrase A106 sequence
tacgaggacaagtttacgatttgctttaaagcaaaggtggagattgaagtggtaagataa

SEQ ID NO: 37539 - DNA, 260 bp, Unknown
  Description of Unknown: RightRegion for integrase A107 sequence
tatgataataaagcggtggttgaattcaaatccggacttcaatctgaagtggagatatagaatgaatattttttagcctgtaggatagaaaccacgggcttttttgtatttctatgataaaatatatgtaatgatatttttgcttttactacagtaattttagatatattcccgtttacctttgacattcataatggtgtctcaaggcacgtcgagtgcgtagtgttgctacaacgaagcaaagggtaaaaatcctttat

SEQ ID NO: 37540 - DNA, 260 bp, Unknown
  Description of Unknown: RightRegion for integrase A108 sequence
gttgtccgtcgcgaggtccgcgagggccgtgaacgacagcgagaacgccagtgcgccgacggcgattgtgccgcccgtggccacccgtaccggcgatagaatcctcatctgcaagtgcctccttatggtgtctgagctgcgaagacagtctgtcgcaactgtacttgtctcggccagccgagggatgtacacttgcgattatggcacagccgctaagagccctggtaggagccagggtatcggtcgttcaggggccgcag

SEQ ID NO: 37541 - DNA, 260 bp, Unknown
  Description of Unknown: RightRegion for integrase A109 sequence
cgacgacggctcgtacaagaccgttcacaaaaacggcaaggaccacaaggtctacaagtgcgtccgtcactgcggcggaggccgcggcaagaccgagaccaccgatccgtggtgatctaaccccgcataccaagaaaccccctacccggcccgcgaaggctaggtagggggctttttgtgtttcagtgggtgtggtcgtgatgacctgtgtcttcgtggtttgtctggtcaaccaccgcggtctcagtggtgtacggtac

SEQ ID NO: 37542 - DNA, 260 bp, Unknown; identical to SEQ ID NO: 37540
  Description of Unknown: RightRegion for integrase A110 sequence

SEQ ID NO: 37543 - DNA, 260 bp, Unknown
  Description of Unknown: RightRegion for integrase A111 sequence
gttgtccgtcgcgaggtccgcgagggccgtgaacgacagcgagaacgccagtgcgccgacggcgattgtgccgcccgtggccacccgtaccggcgatagaatcctcatctgcaagtgcctccttatggtgtctgagctgcgaagacagtctgtcgcaactgtacttgtctcggccagccgagggatgtacacttgcggttatggcacagccgctaagagccctggtaggagccagggtatcggtcgttcaggggccgcag

SEQ ID NO: 37544 - DNA, 260 bp, Unknown
  Description of Unknown: RightRegion for integrase A112 sequence
tacgagcagcatctcaggctcggcagcgtggtcgaacggctacacaccgggatgtcgtagagcgactgcccgagaacgcagaaaagccccctacgcgccgtgtaagggcgcgcagagggctctctggtagtctctattcagttgtggggttgcgtccgtcagcgtggacgctagaggtgtttacggggcctcgtggacccgcacgtacggctgcagaggcttgtcacggtaggcgtggtagcgctcggcctcctcggcgc

SEQ ID NO: 37545 - DNA, 260 bp, Unknown
  Description of Unknown: RightRegion for integrase A113 sequence
tacgagcagcatctcaggctcggcagcgtggtcgaacggctacacaccgggatgtcgtagagtggctacccgagagcgcagaaaagccccctacgcgccgtgtaagggcacgcagagggctctctggtagtctctattcagttgtggggttgcgtccgtcagcgtggacgctagaggggtttacggggcctcgtggacccgtacgtacggctgcagaggcttgtcacggtaggcgtggtaacgctccgcctcctcggcgc

SEQ ID NO: 37546 - DNA, 260 bp, Unknown
  Description of Unknown: RightRegion for integrase A114 sequence
tacgagcagcatctcaggctcggcagcgtggtcgaacggctacacaccgggatgtcgtagagcgactacccgagaacgcagaaaagccccctacgcgccgtgtaagggcacgcagagggctctctggtagttctctattcagttgtggggttgcgtccgtcagcgtggacgctagaggggtttacggggcctcgtggacccgcacgtacggctgcagaggcttgtcacggtaggcgtggtagcgctccgcctcctcggcg

SEQ ID NO: 37547 - DNA, 260 bp, Unknown; identical to SEQ ID NO: 37546
  Description of Unknown: RightRegion for integrase A115 sequence

SEQ ID NO: 37548 - DNA, 260 bp, Unknown
  Description of Unknown: RightRegion for integrase A116 sequence
tacgagcagcatctcaggctcggcagcgtggtcgagcagctacacgccgggatgtcgtagagcggctacccgagaacgcagaaaagccctctacgcgccgtgtaagggcgcgcagagggctctctggcagtctctattcagttgtggggttgcgtccgtcagcgtggacgctagaggggtttacggggcctcgtggacccgtacgtacggctgcagaggcttgtcacggtaggcgtggtagcgctccgcctcctcggcgc

SEQ ID NO: 37549 - DNA, 260 bp, Unknown
  Description of Unknown: RightRegion for integrase A117 sequence
tacgagcagcatctcaggctcggcagcgtggtcgaacagctacacaccgggatgtcgtagagcggctacccgagaacgcagaaaagccccctacgcgccgtgtaagggcacgcagagggctctctggtagtctctattcagttgtggggttgcgtacgtcagcgtggacgctagaggggtttacggggcctcgtggacccgcacgtacggctgcagaggcttgtcacggtaggcgtggtatcgctcggcctcctcggcgc

SEQ ID NO: 37550 - DNA, 260 bp, Unknown
  Description of Unknown: RightRegion for integrase A118 sequence
attttttgtgaccaaacagtggctataaaatttaagaatggaatagaggtagtagagtaattctatgaaattttgatataatgtgtgtaaaaaaagtaggtaagaataaagtcttatgaacgagttttgctataaacttaaaggaaaaatacttagaactggccagaaatgggatttgctttcgagttcccaagctgatgtacccctctttgtcgcaaagtatctaaataatgagccaccaaggtatgtggggaaaatac

SEQ ID NO: 37551 - DNA, 260 bp, Unknown
  Description of Unknown: RightRegion for integrase A119 sequence
ggcggggggtttttcagtcgagcgaggtcagcctggcatacgcgtcaagcgttgtccacaaaccctaaagatcgggaactcgatgttcagactttgtgaaagggctgtcttcatggacaactgtaacacgttctagtctgacgaccctggcgtaggcgatccgattttgcggctatgcgaacatcggatacgctgctgacatgcgagttcttggaagaatcagattgtcgagagccacagacgagagcaccagcgtcgag

SEQ ID NO: 37552 - DNA, 260 bp, Unknown
  Description of Unknown: RightRegion for integrase A120 sequence
tacgagcagcatctcaggctcggcagcgtggtcgaacggctacacaccgggatgtcgtagagcggctacccgagaacgcagaaaagccccctacgcgccgtgtaagggcacgcagagggctctctggtagtctctattcagttgtgtggttgcgtccgtcagcgtggacgctagaggggtttacggggcctcgtggacccgtacgtacggctgcagaggcttgtcacggtaggcgtggtagcgctccgcctcctcggcgc

SEQ ID NO: 37553 - DNA, 260 bp, Unknown
  Description of Unknown: RightRegion for integrase A121 sequence
gaaataactttcgctttaaaatgtgggctgaatttaacagaaaggttggtaaagatatgacacatacaccatatggataccgcatcgaaaatggaatagcggtagttgatgaagttgatgcagaaagaatcaaggctctttatcaagaatacattgattgtaagtctatgagagctgctactaagaaagctggaattgataagactcattcagttataggtagaattctaaagaataaagtatatcttggtacagtttat

SEQ ID NO: 37554 - DNA, 60 bp, Unknown
  Description of Unknown: RightRegion for integrase A122 sequence
attaaggaaaatagaaatattgaatttatctttaaaaatggtgaggttacagttcattga

SEQ ID NO: 37555 - DNA, 60 bp, Unknown
  Description of Unknown: RightRegion for integrase A123 sequence
attaccaaagaaaaatcagctattttcaccttcaagagtggtcaggaaattatcatttga

SEQ ID NO: 37556 - DNA, 60 bp, Unknown
  Description of Unknown: RightRegion for integrase A124 sequence
ataaaagtagacaagcacatcagcctaaccttcaaaaatggcgtgcggattgatttataa

SEQ ID NO: 37557 - DNA, 60 bp, Unknown
  Description of Unknown: RightRegion for integrase A125 sequence
attaaagagggcaagaaaatcagcctcaccttcaaaaatggtgttcggattgatttatag

SEQ ID NO: 37558 - DNA, 60 bp, Unknown; identical to SEQ ID NO: 37557
  Description of Unknown: RightRegion for integrase A126 sequence

SEQ ID NO: 37559 - DNA, 60 bp, Unknown; identical to SEQ ID NO: 37557
  Description of Unknown: RightRegion for integrase A127 sequence

SEQ ID NO: 37560 - DNA, 260 bp, Unknown
  Description of Unknown: RightRegion for integrase A128 sequence
gtagtagattctgaaggtcaaatagatgtcataactcctcttggggttgttaaagattaattttacgtgtttcaaaccacatctccaatgtaacatgttttgaaacacagaaaccaattcgaattttcttcgggatttttccaaaaaaaataacgtttttgtatcagtcattttgtttttgataagttatatttatagcatggccacaaagaaagagagggtaccgattctggttcctctctttttctattttaattttg

SEQ ID NO: 37561 - DNA, 260 bp, Unknown
  Description of Unknown: RightRegion for integrase A129 sequence
gtagtagattctgatggtcaaatagatgtcataactcctctaggggttattaaagattaattttacgtatttcaaaccacatctccaatataacatgttttgaaacacagaaaccaattcgaattttcttcgggatttttccaaaaaaaataacgtttttgtatcagtcatttggattttgataagttatatttatagcatggccacaaagaaagagagggtaccgattctggttcctctctttttctattttaattttg

SEQ ID NO: 37562 - DNA, 260 bp, Unknown; identical to SEQ ID NO: 37509
  Description of Unknown: RightRegion for integrase A130 sequence

SEQ ID NO: 37563 - DNA, 260 bp, Unknown
  Description of Unknown: RightRegion for integrase A131 sequence
gggaccatccacgcctgagccacgccgttgtcggccgcgagctcggtgagcgcggtgaacgacagcgagaacgccagagcgccgaccgccacggttccggctgtcgcgacacgcacgggggatagaatcgacattgcacgagctcctatctcgtgtatcgcccctggtctgttcgcgcaggccaggggctttctgacctagtgaagaatcccgaaaatcgggagcccgagtttcaacattcttctctccttgctactgtg

SEQ ID NO: 37564 - DNA, 260 bp, Unknown
  Description of Unknown: RightRegion for integrase A132 sequence
gatgagctgacattcaatttgaaatgcggtctttccctgaaagaaaaggtggtgagataaatggcatatattccatatggatacaaaattcaagatggagtggttactgtcgatgaaaaggcagcaggtcaagtaaaggtattctttgagaaatacatatcaggactatcccttacagtggctggcgaacaggcaggtattgataagacacactctgtgatgggtcgcattttgaaaaacgtcaactaccttggaaatga

SEQ ID NO: 37565 - DNA, 260 bp, Unknown
  Description of Unknown: RightRegion for integrase A133 sequence
acagtctatgaagaccacttcgtcatagccttcaaatcaggtttcgaaatggaagtatgagatgcatttgattatttttgtattgaacacatcgttttgttgtgttattctataggttgatataaataaagatgtaggaggaaccgaaactatgacagcatcaatacgtttaagataagctggcaataaaaaaggcagaatctatcccaatgataggcttttttgttgtgcttatttatacgatattgagcattcattag

SEQ ID NO: 37566 - DNA, 260 bp, Unknown
  Description of Unknown: RightRegion for integrase A134 sequence
ggccccatcgaggagcgcgtgcgcctccactggcacccgccgctcgagctcgccgcctagtttcgcgggaagagcaacaaaggcggacgctggtggcggacgctgggcggacgatgccctcccccagcgtccgcctagcaccgtccgccaccgtccgccaccgtccgccgagcccaaaatgacaccaccgtccgcccagcgtccgccccagcgtccgccccagcgtccgcctagaaacccgcggaattacgcggcaaaac

SEQ ID NO: 37567 - DNA, 260 bp, Unknown
  Description of Unknown: RightRegion for integrase A135 sequence
atcaccaaggatagtgatgttgaaattacatttaagaacggagcggtctcaactatataggtacgactgctttattttttttgatataatagatgtaaaataatttagtaagaacggtgaattgaatggattttgaaactttaactcgttttatcatttgtgaagcaaaagtgttgagtggtcagacattcaataattttgaagaatttttagtggtttttgaagaattctatagttctattacgaatgaactggttaga

SEQ ID NO: 37568 - DNA, 260 bp, Unknown
  Description of Unknown: RightRegion for integrase A136 sequence
atcaccaaggatagtgatgttgaaattacatttaagaacggagcggtctcaactatataggtacgactgctttatttttttttgatataatagatgtaaaataatttagtaagaacggtgaattgaatggattttgaaactttaactcgttttatcatttgtgaagcaaaagtgttgagtggtcagacattcaataattttgaagaatttttagtggtttttgaagaattctatagttctattacgaatgaactggttag

SEQ ID NO: 37569 - DNA, 260 bp, Unknown
  Description of Unknown: RightRegion for integrase A137 sequence
actgtgtatgaagaccacttcgtcatagccttcaaatctggcttcgaaatggaaatatgaaaaccagaagtaaatagcccatgactctacagtagagttgtgggttttcttttgcttgctgattataataatattttaataactattgtgtttatcaaccaaatggtttataatattcttagcgtaaacttggaggtgctgtatgactacggcagaaatgattaaagaactgtgtgagcaaatgaatataagtgtttccg

SEQ ID NO: 37570 - DNA, 260 bp, Unknown; identical to SEQ ID NO: 37564
  Description of Unknown: RightRegion for integrase A138 sequence

SEQ ID NO: 37571 - DNA, 260 bp, Unknown
  Description of Unknown: RightRegion for integrase A139 sequence
gggaccatccatgcctgcgccacgccgttgtcggccgcgagctccgtgagcgcggtgaacgacagcgagaacgccagacctccgaccgccacggttccggccgtcgcgacacgcacgggggatagactcagcactgcaccagctcctatctggtgtaacgcccctggtctgttcacgcaggccaggggctcttttcgttagtgaagaatcccgaaaaacgggagcccgagtttcaacattcttctctccttgctactgtc

SEQ ID NO: 37572 - DNA, 260 bp, Unknown; identical to SEQ ID NO: 37571
  Description of Unknown: RightRegion for integrase A140 sequence

SEQ ID NO: 37573 - DNA, 260 bp, Unknown
  Description of Unknown: RightRegion for integrase A141 sequence
gggagcatccacgcctgagccacgccgctgtcggccgcgagctcggtgagcgcggtgaacgacatcgagaaggccagagctccgaccgcgaccgttccggccgtcgcgacacgcacgggggatagaatcgacactgcaccagctcctatctggtgtaacgcccctggtctgttcgcgcaggccaggggctctttcctctagtgaataatcccgagaatcgggagcccgagttttatcattcttcactccttgctaccatg

SEQ ID NO: 37574 - DNA, 260 bp, Unknown
  Description of Unknown: RightRegion for integrase A142 sequence
aatgacttcttcgcccagggcgccgaagagctagaagcaatagcacgcgctgaggcgtgacacagcgggaaggggtcgagccggcgaacccggttcggcccttttttcgtgatctcagatcgttagttagactaactagtggttccttcgtcacggcagcgggcaggcgcacgacgtctgacctgggcgaagtgatgttgtgacgtagtgatccattttcatgattcacataagacttctctaagggcaatccggagtcg

SEQ ID NO: 37575 - DNA, 260 bp, Unknown
  Description of Unknown: RightRegion for integrase A143 sequence
aatgagttcttcgatcagggcgccgaagagcttgaagcaatcgcacgcactgaagcctgatccagcgggaaggggtcgagccggcgaacccggttcggcccttttttcgtggcgtcagatcgttagttagtctaactagtagtgactccgtcacgtcagcgggcaggggcaagccgtctgacctggggcgagtgatgctgtgacgtagtgacccgttttcatgattcacataagacttctctaagggcaatccggagtcg

SEQ ID NO: 37576 - DNA, 60 bp, Unknown
  Description of Unknown: RightRegion for integrase A144 sequence
atttataaaaataaaaaagtagcagttcacttcaaaaacggtcaggttatcgaaatataa

SEQ ID NO: 37577 - DNA, 260 bp, Unknown
  Description of Unknown: RightRegion for integrase A145 sequence
gtcgtggcgacgatgatgccgccgtcgacaacgagggggaccatccacgcctgcgacactccgttgtccgctgagagctcactgagcgccgtgaacgacaacgcgaaggccaagccgccgaccgcgaccgttccggccgtcgccactctgactggggatagcatctgcactggtgaggggtcctttctcttcgacttccaatgtgttggattctgccagcagttcctgtaacattggaaactatgccacaaccgctaaga

SEQ ID NO: 37578 - DNA, 260 bp, Unknown
  Description of Unknown: RightRegion for integrase A146 sequence
tcttgcggtctgcgtcgtgtcgctcccggtcggcttgatcgttgtggccattggagcgtaccgggtagcaaaggccggggatatttatgacgctgcggtcgctcggtacgagcagcaaatctcggactatgttgactggctggatgaagtcaacgcaaaataaaaagccgccctcggtgggcggcgggaggttgctctgaatgtgcgcaaaaaagaaaccggccatgcttgagccggatatgcaggatgccgtgatctac

SEQ ID NO: 37579 - DNA, 260 bp, Unknown
  Description of Unknown: RightRegion for integrase A147 sequence
cactgggagctacgcactcctgagcacgagccgcggctggtcccccgcaccgccgagtgactccccggcgtaggccgccctgtgcgtccacggcgacgccggagagtgtcataggagtgagcctggagacgccagagtgcgccggggatgctgcccataacggttatgtcacggtcaaatcggtgtcagaccccagtcgtaaacttgttcgactgacgttctgacgcaactttcgtcatttctctatccagcttctagtc

SEQ ID NO: 37580 - DNA, 260 bp, Unknown
  Description of Unknown: RightRegion for integrase A148 sequence
ctttattaccatgtcaaccggaaggcgcgaatcattagcaaggacggcccgaacgactgcgattggtctgctgccaattttgcgtatgatctattaagttcgggcgtcgaacttttggaacatgagacggcaagtgaatataacgaacgcgtcgggattccgccgctcgtatctggctatatgaaagcgaggttaaactaatgaacagtttagaagtggcgatctatcttcgtaagtcacgggccgatgttgaggaagaa

SEQ ID NO: 37581 - DNA, 260 bp, Unknown
  Description of Unknown: RightRegion for integrase A149 sequence
tacgagcagcatctcaggctcggcagcgtggtcgaacggctacacgccgggatgtcgtagagcggctacccgagaacgcagaaaagccccctacgcgccgtgtaagggcacgcagagggctctctggtagtctctattcagttgtgtggttgcgtccgtcagcgtggacgctagaggggtttacggggcctcgtggacccgcacgtacggctgcagaggcttgtcacggtaggcgtggtagcgctcggcctcctcgacgc

SEQ ID NO: 37582 - DNA, 260 bp, Unknown
  Description of Unknown: RightRegion for integrase A150 sequence
gacggttccggctgttgccattgggacggcagatagaatcctcatgcaccgctcctatcggtgtgaagtggcccctcgtctgttagcgcaggcggggggttttcaagttggaccgtaccacggcaagcctcctacctggcaagatagtttcccaagtggctcagagtactggtatagtgatcgttatgggaattacgaagttgcaggtcagagcactggtcggtgctcgcgtgtctcacgtccaaggcgaggaaaagaca

SEQ ID NO: 37583 - DNA, 260 bp, Unknown
  Description of Unknown: RightRegion for integrase A151 sequence
tacgagcagcatctcaggctcggcaacgtggtcgaacggctacacaccgggatgtcgtagagcgactacccgagaacgcagaaaagccccctacgcgccgtgtaagggcacgcagagggctctctggcagtctctattcagttgtgggtgtgcgtccgtctccgtggacgctagaggggtttacggggcctcgtggacccgcacgtacggttgcagaggcttgtcacggtaggcgtggtatcgctcggcctcctcggcgc

SEQ ID NO: 37584 - DNA, 260 bp, Unknown; identical to SEQ ID NO: 15830
  Description of Unknown: RightRegion for integrase A152 sequence

SEQ ID NO: 37585 - DNA, 260 bp, Unknown
  Description of Unknown: RightRegion for integrase A153 sequence
tacgagcagcatctcaggctcggcagcgtggtcgagcggctacacaccgggatgtcgtagagcggctacccgagaacgcagaaaagccccctacgcgccgtgtaagggcacgcagagggctctctggtagtctctattcagttgtggggttgcgtacgtcagcgtggacgctagaggggtttacggggcctcgtggacccgcacgtacggctgcagaggcttgtcacggtaggcgtggtatcgctcggcctcctcggcgc

SEQ ID NO: 37586 - DNA, 260 bp, Unknown
  Description of Unknown: RightRegion for integrase A154 sequence
agcagaacggaaattggctttgttatgaaatttggacctatttttaaagagaggatttaagatgaagcatacaccatatggatatattatcgtggacggtaaggcagtagtaaacgaaaaagaggcaaagagattacaaaaaatttgtgataattatctttcaggaatgtcatttgtagcatctgcaaaatcagttggccttaaaatgcagcattctggggttaaaagattgatgcttaataaacgttatttaggggatg

SEQ ID NO: 37587 - DNA, 60 bp, Unknown
  Description of Unknown: RightRegion for integrase A155 sequence
atctataaagacaaacaagtagaagtccacttcaagaacgaacaagtcatatctatgtga

SEQ ID NO: 37588 - DNA, 260 bp, Unknown
  Description of Unknown: RightRegion for integrase A156 sequence
agcaaaaacacatgctacttctgatattgtgaaacttactaatttatcaaataaaagtgtttatgatgtattaaataaatataacgtaaaagctgtaaataaaaatcaatggatagcaacagatgttgatattgaagatgagatagatttatcagttacatttactttgaataagaatggaataagaggtggaattatagatgagaactaatgaacataacttccataatatagaagaagaaatcaaacatgttgctgta

SEQ ID NO: 37589 - DNA, 260 bp, Unknown
  Description of Unknown: RightRegion for integrase A157 sequence
ttgtggactggtatatggcaatcattaaagctgcacaaaataaaggctatgtatggcgatctaaaaaatggttttcaggtaaaaagcaaacgttcttctgtcatgattgtgggaataacttttctgcttaaaattatgaacttaacaaaaaataaaaaaagtcctccaagttttggtcgaggaggaggacttaatcacaaatgtatagcaagacacacaaaagatgtgatgttttactatgctcaattttaacacagaat

SEQ ID NO: 37590 - DNA, 260 bp, Unknown
  Description of Unknown: RightRegion for integrase A158 sequence
gtcacttatctttctaacccatactacaaatctctaacaacaactctttcaactcatgaattctctttccctaaaaaacttgatgtctcagatttttatagatttttagttcaattatctatcgaaaatagacaaaaaattaattcataaaacaaaaaaagccctccaagttttggtagaggaggagggcttaatcacaaatgtatagcaagacacacaaaagatgtgatgttttactatgctcaattttaacacagaat

SEQ ID NO: 37591 - DNA, 260 bp, Unknown
  Description of Unknown: RightRegion for integrase A159 sequence
catccacgcctgcgacacgccgttgtccgctgacagctcactcagcgccgtgaacgataacgcgaaggccaagccgccgaccgcgaccgttccggccgtcgccactctgactggggatagcatctgcactggtgagagccctttcctatcgacttacaatgtgctggattctgccagcagagtccggtacattggaaactatgccacaaccacttagagccctggtcggggcccgagtcagtgtagtccaaggaccgcag

SEQ ID NO: 37592 - DNA, 60 bp, Unknown
  Description of Unknown: RightRegion for integrase A160 sequence
aactctggcagaccagcgttgagcgattggatatcaaagaagataagaaaatcagcctaa

SEQ ID NO: 37593 - skipped

SEQ ID NO: 37594 - DNA, 60 bp, Unknown
  Description of Unknown: RightRegion for integrase A162 sequence
gatcaaatcatagttcacccagatggaaaaattgaaatcctttataaattcaaggtttaa

SEQ ID NO: 37595 - DNA, 100 bp, Unknown
  Description of Unknown: RightRegion for integrase A163 sequence
aagaagcagagagaagacaacttcgaactttggatttatccaaagctgcctgaaaaataggcgtttgtactggtgtctaacatgcagaaggtaactcatt

SEQ ID NO: 37596 - DNA, 260 bp, Unknown
  Description of Unknown: RightRegion for integrase A164 sequence
cgaggagacccggacgctcgacttcgggaacacccgctacacctgctgacaaccgccctcgggccggtccttcggggccggctcgggggctcttttttttttgtgcctaacatatgcacggattcgcatatatttattagggcaacgtgatgttcgaggagtagaacatcactttcaccaaactcatgtaccctgtccctatgcgtgttctcgggagactgcgtctgtccaggtcaacggaggaatctacctccatcgag

SEQ ID NO: 37597 - DNA, 260 bp, Unknown; identical to SEQ ID NO: 24343
  Description of Unknown: RightRegion for integrase A165 sequence

SEQ ID NO: 37598 - DNA, 260 bp, Unknown
  Description of Unknown: RightRegion for integrase A166 sequence
aggggaaccatccacgcctgcgacactccgttgtccgctgaaagctcactgagcgccgtgaacgacaacgcgaaggccaagccgccgaccgcgaccgttccggccgtcgccactctgactggggatagcatctgcactggtaggaggtcctttcccgtcgacttacaatgtgttggattctgccagcagaacctgtaacattggaaactatgccacaaccgcttagagccctggtcggggcccgagtcagtgtagtccaa

SEQ ID NO: 37599 - DNA, 260 bp, Unknown
  Description of Unknown: RightRegion for integrase A167 sequence
ctcactcagcgccgtgaacgacaacgcgaaggccaagctgccgaccgcgaccgtaccggccgtcgcaacccgaaccggggatagaatcttcactgcaccagctcctatctggtgtcacaccctctgcctgttcgcgcaggtagagggccctttgcttacgacttccaatgtgttggattctgccagcagaacctgtaacattggaaactatgccacaaccgcttagagccctggtcggggcgcgtgtcagtgtagtccaa

SEQ ID NO: 37600 - DNA, 260 bp, Unknown
  Description of Unknown: RightRegion for integrase A168 sequence
gcccgagagcccaccctctctgtccggaccgtacctgttcgaccttcgcaaccaacgatgctgacacccgccctcgggtcggtcttcggaccggctcgggggctcctttttttgtgcccaaatcccatgcacgatcacgcatgtatcagtattgggggaacgcgatattcgaggagtagaacatcaccttcaccaaattcatgtatcctaccttcgtgcgtgtgttggggagactgcgtctgtcgaggtcaacggaggaa

SEQ ID NO: 37601 - DNA, 260 bp, Unknown
  Description of Unknown: RightRegion for integrase A169 sequence
agggggaccatccacgcctgcgacactccgttgtccgctgagagctcactgagcgccgtgaacgacaacgcgaaggccaagccgccgaccgcgaccgttccggccgtcgccactctgactggggatagcatctgcactggtaggaggtcctttcccgtcgacttacaatgtgttggattctgccagcagaacctgtaacattggaaactatgccagaaccgcttagagccctggtcggggcccgtgtcagtgtagtgcaa

SEQ ID NO: 37602 - DNA, 260 bp, Unknown
  Description of Unknown: RightRegion for integrase A170 sequence
ctgaggctgggcgcggctctagacctcgtaaacgcagaaaagccccctacgggccgctagggctcgcagagggcttctccggtagtctctattcagttgtactgctgagtccgtcagcgtgggtgctagaggggtttacggggcctcgtggacccgcacgtacggctgcagaggcttgtcacggtaggcgtggtagcgctcggcctcctcggcgcggatggcctcgatctcctgagccgaactcaccttacgacgctgca

SEQ ID NO: 37603 - DNA, 260 bp, Unknown
  Description of Unknown: RightRegion for integrase A171 sequence
ctgaggctgggctcggctctagaccttgtaaacgcagaaaagccccctacgggccgctagggcacgcagagggctctctggtagtctctattcagttgtactgctgagcccgtcagcgtggacgctagaggggtttacggggcctcgtggacccgcacgtacggctgcagaggcttgtcacggtaggcgtggtagcgctctttctcgtcggagatcggcttgagaagctcgctgtcgatatgctcccgcacgaccttcat

SEQ ID NO: 37604 - DNA, 260 bp, Unknown
  Description of Unknown: RightRegion for integrase A172 sequence
ctgaggctgggctcggctctagaccttgtaaacgcagaaaagccccctacgggccgctagggctcgcagagggcttctccggtagtctctattcagttgtactgctgagtccgtcagcgtggacgctagaggggtttacggggcctcgtggacccgcacgtacggctgcagaggcttgtcacggtaggcgtggtagcgctcggcctcctcggcgcggatggcctcgatctcctgagccgcgctcaccttacgacgctgca

SEQ ID NO: 37605 - DNA, 260 bp, Unknown
  Description of Unknown: RightRegion for integrase A173 sequence
ctgaggctgggcacggctctagacctcgtaaacgcagaaaagccccctacgggccgctagggctcgcagagggcttctccggtagtctctattcagttgtactgctgagtccgtcagcgtggacgctagaggggtttacggggcctcgtggacccgcacgtacggctgcagaggcttgtcacggtaggcgtggtagcgctcggcctcctcgacgcggatggcctcgatctcctgagccgcgctcaccttacgacgctgca

SEQ ID NO: 37606 - DNA, 260 bp, Unknown; identical to SEQ ID NO: 37605
  Description of Unknown: RightRegion for integrase A174 sequence

SEQ ID NO: 37607 - DNA, 260 bp, Unknown
  Description of Unknown: RightRegion for integrase A175 sequence
ctgaggctgggctcggctctggacctcgtaaacgcagaaaagccccctacgggccgctagggctcgcagagggcttctccggtagtctctattcagttgtgggtgtgcgtccgtcagcgtggacgctagaggggtttacggggcctcgtggacccgcacgtacggctgcagaggcttgtcacggtaggcgtggtagcgctcggcctcctcggcgcggatggcctcgatctcctgagccgcgctcaccttacgacgctgca

SEQ ID NO: 37608 - DNA, 260 bp, Unknown; identical to SEQ ID NO: 24346
  Description of Unknown: RightRegion for integrase A176 sequence

SEQ ID NO: 37609 - DNA, 260 bp, Unknown
  Description of Unknown: RightRegion for integrase A177 sequence
ctgaggctgggcgcggctctatacctcgtaaacgcagaaaagccccctacgggccgctagggctcgcagagggcttctccggtagtctctattcagttgtactgctgagtccgtcagcgtgggcgctagaggggtttatggtgcctcgtggacccgcacgtacggctgcagaggcttgtcacggtaggcgtggtagcgctctttctcgtcggagatcgacttgagaagctcgctgtcgatattctcccgcacgaccttca

SEQ ID NO: 37610 - DNA, 260 bp, Unknown
  Description of Unknown: RightRegion for integrase A178 sequence
ctgaggctgggcacggctctagacctcgtaaacgcagaaaagccccctacgggccgctagggctcgcagagggcttctccggtagtctctattcagttgtactgctgagtccgtcagcgtggatgctagaggggtttacggggcctcgtggacccgtacgtacggttgcagaggcttgtcacggtaggcgtggtatcgctcggcctcctcggcgcggatggcctcgatctcctgagccgcgctcaccttacgacgctgca

SEQ ID NO: 37611 - DNA, 260 bp, Unknown; identical to SEQ ID NO: 24346
  Description of Unknown: RightRegion for integrase A179 sequence

SEQ ID NO: 37612 - DNA, 260 bp, Unknown
  Description of Unknown: RightRegion for integrase A180 sequence
ctgaggctgggctcggctctagacctcgtaaacgcagaaaagccccctacgggccgctagggctcgcagagggcttctccggcagtctctattcagttgtgggtgtgcgtccgtctccgtggacgctagaggggtttacggggcctcgtggacccgcacgtacggctgcagaggcttgtcacggtaggcgtggtatcgctcggcctcctcggcgcggatggcctcgatctcctgagccgcgctcaccttacgacgctgca

SEQ ID NO: 37613 - DNA, 260 bp, Unknown; identical to SEQ ID NO: 24346
  Description of Unknown: RightRegion for integrase A181 sequence

SEQ ID NO: 37614 - DNA, 260 bp, Unknown
  Description of Unknown: RightRegion for integrase A182 sequence
ctgaggctgggcgcggctctagacctcgtaaacgcagaaaagccccctacgggccgctagggctcgcagagggcttctccggtagtctctattcagttgtgggtgcgcgtccgtctccgtggacgctagaggggtttacggggcctcgtggacccgcacgtacggctgcagaggcttgtcacggtaggcgtggtagcgctcggcctcctcggcgcggatggcctcgatctcctgagccgcgctcaccttacgacgctgca

SEQ ID NO: 37615 - DNA, 260 bp, Unknown
  Description of Unknown: RightRegion for integrase A183 sequence
gaaaataataatcaatccaaagttttaggtttaagattaaaaacagtacatgacttagctaccgctcttaatgttaaagaaaataaaatattaattttagataaagactaggttttaattatatttatttacctagtctttattttattgaattacatctattaattacatataatgaatgtaaaaggaggtattttccaatgaataaaaaaatatgtatttatttaagaaagtctagagctgatgaagaacttgaaaaa

SEQ ID NO: 37616 - DNA, 260 bp, Unknown
  Description of Unknown: RightRegion for integrase A184 sequence
cactgaattaaaaagtgaaatatcagaagttaagaaaactgtaataagaattgaaaatgaccatggtaaaaaacttgaagctttatttgatggttataaacaaaattcagagaaacttaatagaattgaagatgaagttgccaaacataaagaagtaattataaaaaggattaaataattatatttaatgaggtgatgttttgaataaaatttgtatttatttaagaaaatcacgtgctgatgaagaacttgaaaaaact

SEQ ID NO: 37617 - DNA, 260 bp, Unknown; identical to SEQ ID NO: 37616
  Description of Unknown: RightRegion for integrase A185 sequence

SEQ ID NO: 37618 - DNA, 260 bp, Unknown
  Description of Unknown: RightRegion for integrase A186 sequence
cactgaattaaaaagtgaaatatcagaagttaagaaaactgtaataagaattgaaaatgaccatggtaaaaaacttgaagctttatttgatggttataaacaaaattcagagaaacttaatagaattgaaaatgaagttgccaaacataaagaagtaattataaaaaggattaaataattatatttaatgaggtgatgttttgaataaaatttgtatttatttaagaaaatcacgtgctgatgaagaacttgaaaaaact

SEQ ID NO: 37619 - DNA, 260 bp, Unknown
  Description of Unknown: RightRegion for integrase A187 sequence
gtggatcttcgtggcgatcaacaacagcggcaagaccaagacggtctaccgctgaccccgacctccgggctggccttcgggctggcccgggggtctttttttgtgcccaacatatgcacgtattcgcatctgtttgtttggggaacgtgatattcgaggagtagaacatcacctttaccaaactcttgtatcctgtcggtatgcgtgtactaggaagactgcgtctgtccaggtcaacggaggaatctacctccatcgag

SEQ ID NO: 37620 - DNA, 260 bp, Unknown
  Description of Unknown: RightRegion for integrase A188 sequence
gggaccatccatgcgtgggccactccgctgtcggccgccagctccgtgagggcggtgaacgagagcgagaacgccaggcccccaacgaaaacggtgcctgcggtagccagcttgacgggagagagcatcggagcctttcgggggatgtgatgttcgaggagtagaacatcacttttaccaaactccggtatccttgtcatatgcgagtgctcggaagattgcgtttgtccaggtcaacggaggaatctacctccatcgag

SEQ ID NO: 37621 - DNA, 260 bp, Unknown
  Description of Unknown: RightRegion for integrase A189 sequence
ctctctgttcggaccgtacctgttcgaccttcgcaaccaacgatgctgacacccgccctcgggtcggtcttcggaccggctcgggggctcctttttttgtgcccaaatcccatgcacgatcacgcatgtatcagtattgggggaacgcgatattcgaggagtagaacatcaccttcaccaaattcatgtatcctaccttcgtgcgtgtgttggggagactgcgtctgtcgaggtcaacggaggaatccacctcgattgag

SEQ ID NO: 37622 - DNA, 260 bp, Unknown
  Description of Unknown: RightRegion for integrase A190 sequence
gtccagcccagccacgtctccttcgagatggggctacttgtgctggcacgacacggtgagtggctaggtccgtgggtcgcattgggacaaagcccgcagggctagggggacaaggcgagggccacaggtctagccgcccgtagggcgtccttacggtcaggggagcccccgtcaggggtcagtctccaggagccgtttcaatgccaacgtacgatagatccatgcgcgtgataggccgactaagaatctcccgtcagtcc

SEQ ID NO: 37623 - DNA, 260 bp, Unknown
  Description of Unknown: RightRegion for integrase A191 sequence
gtccagcccagccacgtctccttcgagatggggctacttgtgctggcacgacacggtgagtggctaggtccgtgggtcgcattgggacaaagcccgcagggctagggggacaaggcgagggccaagggtctagccgcccgtagggcgtccttacggtcaggggagcccccgtcaggggtcagtctccaggagccgttccaatgccaacgtacgatagatccatgcgcgtgataggccgactaagaatctcccgacagtcc

SEQ ID NO: 37624 - DNA, 260 bp, Unknown
  Description of Unknown: RightRegion for integrase A192 sequence
agtccagcccagccacgtctccttcgagatggggctacttgtgctggcctgacacggtgaggggctaggtccgtgggtcgcattgggacaagcccgcagggctagggggacaaagcgagggccaagagtctagtcgcccgaagggcgtccttacggtcaggggagcccccgtcaggggtcagtctccaggagccgtttcaatgccaacgtacgatagatccatgcgcgtgataggccgactgagaatctcccgacaaacc

SEQ ID NO: 37625 - DNA, 260 bp, Unknown; identical to SEQ ID NO: 37624
  Description of Unknown: RightRegion for integrase A193 sequence

SEQ ID NO: 37626 - DNA, 260 bp, Unknown
  Description of Unknown: RightRegion for integrase A194 sequence
gggaccatccatgcgtgggccactccgctgtcggccgccagctccgtgagggcggtgaacgacagggagaacgcgaggccgccaacgaacacggtgcctgcggtagccagcttgacgggagagagcatcggagcctttcgggggatgtgatgttcgaggagtagaacatcacttttaccaaactccggtatccttgtcatatgcgagttctgggaagattgcgtttgtcgaggtcaacggaggaatctacctccatcgag

SEQ ID NO: 37627 - DNA, 260 bp, Unknown
  Description of Unknown: RightRegion for integrase A195 sequence
agtccagcccagccacgtctccttcgagatggggctacttgtgctggcctgacacggtgaggggctaggtccgtgggtcgcattgggacaagcccgcagggctagggggacaaagcgagggccaagagtctagtcgcccgaagggcgtccttacggtcaggggagcccccgtcaggggccaatctccaggagccgttccgatgccaacgtacgatagatccatgcgcgtgataggccgactgagaatctcccgacaaacc

SEQ ID NO: 37628 - DNA, 260 bp, Unknown
  Description of Unknown: RightRegion for integrase A196 sequence
ctctctgtccggaccgtacctgttcgaccttcgcaaccaacgatgctgacacccgccctcgggtcggtcttcggaccggctcgggggctcctttttttgtgcccaaatcccatgcacgatcacgcatgtatcagtattgggggaacgcgatattcgaggagtagaacatcaccttcaccaaattcatgtatcctaccttcgtgcgtgtgttggggagactgcgtctgtcgaggtcaacggaggaatccacctcgattgag

SEQ ID NO: 37629 - DNA, 260 bp, Unknown
  Description of Unknown: RightRegion for integrase A197 sequence
gggaccatccatgcgtgggccactccgctgtcggccgccagctccgtgagggcggtgaacgagagcgagaacgccaggcccccaacgaaaacggtgcctgcggtggccagcttgacgggagagagcatcggagcctttcgggggatgtgatgttcgaggagtagaacatcacttttaccaaactccggtatccttgtcatatgcgagtgctcggaagattgcgtttgtccaggtcaacggaggaatctacctccatcgag

SEQ ID NO: 37630 - DNA, 260 bp, Unknown
  Description of Unknown: RightRegion for integrase A198 sequence
ctgaggctgggctcggctctagacctcgtaaacgcagaaaagccccctacgggccgctagggctcgcagagggcttctccggtagtctctattcagttgtactgctgagtccgtcagcgtgggcgctagaggggttttacggggcctcgtggacccgcacgtacggctgcagaggcttgtcacggtaggtgtggtagcgctcggcctcctcggcgcggatggcctcgatctcctgagccgcgctcaccttacgacgctct

SEQ ID NO: 37631 - DNA, 260 bp, Unknown
  Description of Unknown: RightRegion for integrase A199 sequence
acgacagcgagaacgccagggctccgaccgccacggttccggccgtcgcgacacgcacgggggatagaatcgacattgcacgagctcctatctcgtgtatcgcccctggtctgttcgcgcaggccaggggctcttctgacctagtgaagaatcccgaaagtcgggagcccgagtttcaacattcttctctccttgctactgtgtctgacatgcgagttcttggaagattgcgaatttcacgagccactgaggaatctacc

SEQ ID NO: 37632 - DNA, 260 bp, Unknown
  Description of Unknown: RightRegion for integrase A200 sequence
acggttccagccgtcgcggacctgagcggggtgatctcccgtagaatttccattgcacctggtcctttcaggtgtaacgcctcctaccagtcctgcgcctaaacagctggtagggggcttctttcgttgttgtggagcgatacggtacatcatctcaagtgtgtttgcttcgggcaaccgagcagcgtacatttgaaatcatgacccaaacactccgcgccctggtaggcgcacgtgtcagcgtagtccaaggtccgcag

SEQ ID NO: 37633 - DNA, 260 bp, Unknown
  Description of Unknown: RightRegion for integrase A201 sequence
tacgagcagcatctcaggctcggtagcgtggtcgaacggctacacgccgggatgtcgtagagcggatacccgagaacgcagaaaagccccctacgcgccgtgtaagggcacgcagagggctctctggtagtctctattcagttgtggggttgcgtccgtcagcgtgtctacccagctccgcgtacggccccttgacaagctgagcgacctgagcggtggtaagaggcgcgaacgccttccgaaccgctacgagtacggct

SEQ ID NO: 37634 - DNA, 260 bp, Unknown
  Description of Unknown: RightRegion for integrase A202 sequence
tacgagcagcatctcaggctcggcagcgtggtcgaacggctacacaccgggatgtcgtagagcggctacccgagaacgcagaaaagccccctacgcgccgtgtaagggcacgcagagggctctctggcagtgtctctattcagttgtggggttgcgtccgtcagcgtggacgctagaggggtttacggggcctcgtggacccgcacgtacggctgcagaggcttgtcacggtaggcgtggtatcgctcggcctcctcggc

SEQ ID NO: 37635 - DNA, 260 bp, Unknown
  Description of Unknown: RightRegion for integrase A203 sequence
tacgagcagcatctcaggctcggcagcgtggtcgaacggctacacaccgggatgtcgtagagcggctacccgagaacgcagaaaagccccctacgcgccgtgtaagggcacgcagagggctctctggtagtctctattcagttgtgtggttgcgtccgtcagcgtggacgctagaggggtttacggggcctcgtggacccgcacgtacggctgcagaggcttgtcacggtaggcgtggtagcgctccgcctcctcgacgc

SEQ ID NO: 37636 - DNA, 260 bp, Unknown
  Description of Unknown: RightRegion for integrase A204 sequence
tacgagcagcatctcaggctcggcagcgtggtcgaacggctacacaccgggatgtcgtagagcggctacccgagaacgcagaaaagccccctacgcgccgtgtaagggcacgcagagggctctctggtagtctctattcagttgtggggttgcgtccgtcagcgtggacgctagaggggtttacggggcctcgtggacccgcacgtacggctgcataggcttgtcacggtaggcgtgatagcgctcggcctcctcggcgc

SEQ ID NO: 37637 - DNA, 260 bp, Unknown
  Description of Unknown: RightRegion for integrase A205 sequence
tacgagcagcatctcaggctcggcagcgtggtcgaacggctacacaccgggatgtcgtagagcggctgcccgagaacgcagaaaagccccctacgcgccgtgtaagggcacgcagagggctctctggcagtctctattcagttgtggggttgcgtccgtcagcgtggacgctagaggggtttacggggcctcgtggacccgcacgtacggctgcagaggcttgtcacggtaggcgtggtatcgctcggcctcctcggcgc

SEQ ID NO: 37638 - DNA, 260 bp, Unknown
  Description of Unknown: RightRegion for integrase A206 sequence
tacgagcagcacctcaggctcggtagcgtggtcgaacggctacacaccgggatgtcgtagagcgactaccctgagaacgcagaaaagccccctacgcgccgtgtaagggcacgcagagggctctctggtagtctctattcagttgtactgctgagtccgtcagcgtgggtgctagaggggtttacggggcctcgtggacccgcacgtacggctgcagaggcttgtcacggtaggcgtggtagcgctcggcctcctcggcg

SEQ ID NO: 37639 - DNA, 260 bp, Unknown
  Description of Unknown: RightRegion for integrase A207 sequence
tacgagcagcatctcaggctcggcagcgtggtcgaacggctacacaccgggatgtcgtagagcgactacccccgagaacgcagaaaagccccctacgcaccgtgtaagggcacgcagagggctctctggtagtctctattcagttgtgtggttgcgtccgtcagcgtggacgctagaggggtttacggggcctcgtggacccgcacgtacggctgcagaggcttgtcacggtaggcgtgatatcgctccgcctcctcggc

SEQ ID NO: 37640 - DNA, 260 bp, Unknown
  Description of Unknown: RightRegion for integrase A208 sequence
tacgagcagcatctcaggctcggcagcgtggtcgaacggctacacgccgggatgtcgtagagcggctacccgagaacgcagaaaagccccctacgcgccgtgtaagggcacgcagagggctctctggtagtctctattcagttgtggggttgcgtccgtcagcgtggacgctagaggggtttacggggcctcgtggacccgcacgtacggctgcagaggcttgtcacggtaggcgtggtatcgctcggcctcctcgacgc

SEQ ID NO: 37641 - DNA, 260 bp, Unknown
  Description of Unknown: RightRegion for integrase A209 sequence
tacgagcagcatctcaggctcggtagcgtggtcgaacggctacacgccgggatgtcgtagagcggctacccgagaacgcagaaaagccccctacgcgccgtgtaagggcacgcagagggctctctggtagtctctattcagttgtggggttgcgtccgtcagcgtggacgctagaggggtttacggggcctcgtggacccgtacgtacggctgcagaggcttgtcacggtaggcgtggtagcgctctttctcgtcggtcg

SEQ ID NO: 37642 - DNA, 260 bp, Unknown
  Description of Unknown: RightRegion for integrase A210 sequence
tacgagcagcatctcaggctcggcagcgtggtcgaacggctacacaccgggatgtcgtagagcggatacccgagaacgcagaaaagccccctacgcgccgtgtaagggcacgcagagggctctctggtagtctctattcagttgtgtggttgcgtccgtcagcgtggacgctagaggggtttacggggcctcgtggacccgcacgtacggctgcagaggcttgtcacggtaggcgtggtagcgctccgcctcctcggcgc

SEQ ID NO: 37643 - DNA, 260 bp, Unknown
  Description of Unknown: RightRegion for integrase A211 sequence
tacgagcagcatctcaggctcggcagcgtggtcgaacggctacacaccgggatgtcgtagagcggctacccgagaacgcagaaaagccccctacgcgccgtgtaagggcacgcagagggctctctggtagtctctattcagttgtggggttgcgtacgtctccgtggacgctagaggggtttacggggcctcgtggacccgcacgtacggctgcagaggcttgtcacggtaggcgtgatagcgctccgcctcctcgacgc

SEQ ID NO: 37644 - DNA, 260 bp, Unknown
  Description of Unknown: RightRegion for integrase A212 sequence
tacgagcagcatctaaggctcggcagcgtggtcgaacagctacacgccgggatgtcgtagagcggctacccgagaacgcagaaaagccccctacgcgccgtgtaagggcacgcagagggctctctggtagtctctattcagttgtggggttgcgtccgtcagcgtgtctacccagctccgcgtacggccccttgacaagctgagcgacctgagcggtggtaagaggcgcgaacgccttccgaaccgctacgagtacggct

SEQ ID NO: 37645 - DNA, 260 bp, Unknown
  Description of Unknown: RightRegion for integrase A213 sequence
tacgagcagcatctcaggctcggtagcgtggtcgaacggctacacgccgggatgtcgtagagcgactaccccgagaacgcagaaaagccccctacgcgccgtgtaagggcacgcagagggctctctggtagtctctattcagttgtggggttgcgtccgtcagcgtggacgctagaggggtttacggggcctcgtggacccgtacgtacggctgcagaggcttgtcacggtaggcgtgatagcgctcggcctcctcgacg

SEQ ID NO: 37646 - DNA, 260 bp, Unknown
  Description of Unknown: RightRegion for integrase A214 sequence
tacgagcagcatctcaggctcggcagcgtggtcgaacggctacacaccgggatgtcgtagagcggctacccccgagaacgcagaagagccccctacgggccgctagggctcgcagagggcttctccggtagtctctattcagttgtactgctgagtccgtcagcgtgggcgctagaggggttttacggggcctcgtggacccgcacgtacggctgcagaggcttgtcacggtaggcgtggtatcgctcggcctcctcggc

SEQ ID NO: 37647 - DNA, 260 bp, Unknown; identical to SEQ ID NO: 37506
  Description of Unknown: RightRegion for integrase A215 sequence

SEQ ID NO: 37648 - DNA, 260 bp, Unknown
  Description of Unknown: RightRegion for integrase A216 sequence
tacgagcagcatctcaggctcggcagcgtggtcgaacagctacacaccgggatgtcgtagagcgactacccgagaacgcagaaaagccccctacgcgccgtgtaagggcacgcagagggctctctgatagtctctattcagttgtgtggttgcgtccgtcagcgtggacgctagaggggtttacggggcctcgtggacccgcacgtacggctgcagaggcttgtcacggtaggcgtggtaacgctccgcctcctcggcgc

SEQ ID NO: 37649 - DNA, 260 bp, Unknown
  Description of Unknown: RightRegion for integrase A217 sequence
tacgagcagcatctcaggctcggcagcgtggtcgaacggctacacaccgggatgtcgtagagcggctacccgagaacgcagaaaagccccctacgcgccgtgtaagggcacgcagagggctctctggtagtctctattcagttgtggggttgcgtccgtcagcgtggacgctagaggggtttacggggcctcgtggacccgtacgtacggctgcagaggcttgtcacggtaggcgtggtagcgctcggcctcctcgacgc

SEQ ID NO: 37650 - DNA, 260 bp, Unknown
  Description of Unknown: RightRegion for integrase A218 sequence
tacgagcagcatctcaggctcggcagcgtggtcgaacagctacacaccgggatgtcgtagagcggctacccccgagaacgcagaagagccccctacgcgccgtgtaagggcacgcagagggctctctggtagtctctattcagttgtggggttgcgtccgtcagcgtggacgctagaggggtttacggggcctcgtggacccgcacgtacggctgcagaggcttgtcacggtaggcgtggtagcgctcggcctcctcggc

SEQ ID NO: 37651 - DNA, 260 bp, Unknown
  Description of Unknown: RightRegion for integrase A219 sequence
tacgagcagcacctcaggctcggcagcgtggtcgaacgactacacgccgggatgtcgtagagcggctacccgagaacgcagaaaagccccctacgcgccgtgtaagggcacgcagagggctctctggtagtctctattcagttgtggggttgcgtccgtcagcgtggacgctagaggggtttacgggtcctcgtggacccgtacgtacggctgcagaggcttgtcacggtaggcgtggtagcgctctttctcgtcggtcg

SEQ ID NO: 37652 - DNA, 260 bp, Unknown
  Description of Unknown: RightRegion for integrase A220 sequence
tacgagcagcatctcaggctcggcagcgtggtcgaacggctacacaccgggatgtcgtagagcggctacccgagaacgcagaaaagccccctacgcgccgtgtaagggcacgtagagggctctctggtagtctctattcagttgtgtggttgcgtccgtcagcgtggacgctagaggggtttacggggcctcgtggacccgcacgtacggctgcagaggcttgtcacggtaggcgtgatagcgctccgcctcctcggcgc

SEQ ID NO: 37653 - DNA, 260 bp, Unknown
  Description of Unknown: RightRegion for integrase A221 sequence
tccgaccgcgactgttcctgctgtggcaaagctgaccggggatagaatcttcattgcacgggcctcttccgtgtagtagccctctgccagtcctgcgcctaaacagctggtagggggctcttttcgttgttgtggagcgatacggtacaccatttcaagtgtgtttgcttcgggcagccgagcagcgtacatttgaaatcatgacccaaacactccgcgccctggtaggcgcacgtgtcagcgtagtccaaggtccgcag

SEQ ID NO: 37654 - DNA, 260 bp, Unknown
  Description of Unknown: RightRegion for integrase A222 sequence
tacgagcagcatctcaggctcggtagcgtggtcgaacggctacacgacgggatgtcgtagagcggctacccgagaacgcagaaaagccccctacgcgccgtgtaagggcacgcagagggctctctggtagtctctattcagttgtggggttgcgtccgtcagcgtgggcgctagaggggtttacggggcctcgtggacccgtacgtacggctgcagaggcttgtcacggtaggcgtggtaccgctcggcctcctcggcgc

SEQ ID NO: 37655 - DNA, 260 bp, Unknown
  Description of Unknown: RightRegion for integrase A223 sequence
tacgagcagcatctcaggctcggcagcgtggtcgaacagctacacaccgggatgtcgtagagcgactaccccccgagaacgcagaaaagccccctacgcgccgtgtaagggcacgcagagggctctctggtagtctctattcagttgcggggctgcgtccgtcagcgtggacgctagaggggtttacggggcctcgtggacccgtacgtacggctgcagaggcttgtcacggtaggcgtggtagcgctccgcctcctcgg

SEQ ID NO: 37656 - DNA, 260 bp, Unknown
  Description of Unknown: RightRegion for integrase A224 sequence
tacgagcagcatctcaggctcggcagcgtggtcgaacagctacacaccgggatgtcgtagagcggctacccccgagaacgcagaagagccccctacgcgccgtgtaagggcacgcagagggctctctggtagtctctattcagttgtggggttgcgtccgccagcgtggacgctagaggggtttacggggcctcgtggacccgcacgtacggctgcagaggcttgtcacggtaggcgtggtagcgctcggcctcctcggc

SEQ ID NO: 37657 - DNA, 260 bp, Unknown
  Description of Unknown: RightRegion for integrase A225 sequence
tacgagcagcatctcaggctcggcaacgtggtcgaacagctacacgccgggatgtcgtagagcgactacccgagaacgcagaaaagccccctacgcgccgtgtaagggcacgcagagggcttctccggtagtctctattcagttgtactgctgagtccgtcagcgtggacgctagaggggtttacggggcctcgtggacccgcacgtacggctgcagaggcttgtcacggtaggcgtgatagcgctccgcctcctcgacg

SEQ ID NO: 37658 - DNA, 260 bp, Unknown
  Description of Unknown: RightRegion for integrase A226 sequence
tacgagcagcatctcaggctcggcagcgtggtcgaacggctacacgccgggatgtcgtagagcgactacccccgagaacgcagaaaagccccctacgcgccgtgtaagggcacgcagaggactctctggtagtctctattcagttgtggggttgcgtccgtcagcgtggacgctagaggggtttacggggcctcgtggacccgtacgtacggctgcagaggcttgtcacggtaggcgtggtagcgctcggcctcctcggc

SEQ ID NO: 37659 - DNA, 260 bp, Unknown
  Description of Unknown: RightRegion for integrase A227 sequence
tacgagcagcatctcaggctcggcagcgtggtcgaacggctacacaccgggatgtcgtagagcgactacccccgagaacgcagaaaagccccctacgcgccgtgtaagggcacgcagagggctctctggtagtctctattcagttgtgtggttgcgtccgtcagcgtggacgctagaggggtttacggggcctcgtggacccgcacgtacggctgcagaggcttgtcacggtaggcgtgatatcgctccgcctcctcggc

SEQ ID NO: 37660 - DNA, 260 bp, Unknown
  Description of Unknown: RightRegion for integrase A228 sequence
tacgagcagcatctcaggctcggcagcgtggtcgaacggctacacgccgggatgtcgtagagcggctacccgagaatgcagaaaagccccctacgcgccgtgtaagggcacgcagagggctctctggtagtctctattcagttgtggggttgcatccgtcagcgtggacgctagaggggtttacggggcctcgtggacccgcacgtacggctgcagaggcttgtcacgataggcgtggtagcgctcggcctcctcggcgc

SEQ ID NO: 37661 - DNA, 260 bp, Unknown
  Description of Unknown: RightRegion for integrase A229 sequence
tacgagcagcatctcaggctcggcagcgtggtcgaacagctacacaccgggatgtcgtagagcggctacccgagaacgcagaaaagccccctacgcgccgtgtaaaggcacgcagagggctctctggtagtatcctattcagttgtgggtgtgcgtccgtcagcgtggacgctagaggggtttacggggcctcgtggacccgcacgtacggctgcagaggcttgtcacggtaggcgtggtagcgctcggcctcctcggcg

SEQ ID NO: 37662 - DNA, 260 bp, Unknown
  Description of Unknown: RightRegion for integrase A230 sequence
tacgagcagcatctcaggctcggcagcgtggtcgaacagctacacaccgggatgtcgtagagcggccacccgagaacgcagaaaagccccctacgcgccgtgtaagggcacgcagagggctctctggtagtctctattcagttgtggggttgcgtccgtcagcgtggacgctagaggggtttacggggcctcgtggacccgtacgtacggctgcagaggcttgtcacggtaggcgtggtatcgctccgcctcctcggcgc

SEQ ID NO: 37663 - DNA, 260 bp, Unknown
  Description of Unknown: RightRegion for integrase A231 sequence
tacgagcagcatctcaggctcggcagcgtggtcgaacggctacacgccgggatgtcgtagagcggctacccgagaacgcagaaaagccccctacgcgccgtgtaagggcacgcagagggctctctggtagtctctattcagttgtactgctgagtccgtcagcgcggacgctagaggggtttacggggcctcgtggacccgcacgtacggctgcagaggcttgtcacggtaggcgtgatagcgctcggcctcctcgacgc

SEQ ID NO: 37664 - DNA, 260 bp, Unknown
  Description of Unknown: RightRegion for integrase A232 sequence
tacgagcagcatctcaggctcggcagcgtggtcgaacggctacacgccgggatgtcgtagagcggctacccgagaacgcagaaaagccccctacgcgccgtgtaagggcacgcagagggctctctggtagtctctattcagttgtggggttgcgtccgtcagcgtggacgctagaggggtttacggggcctcgtggacccgtacgtacggctgcagaggcttgtcacggtaggcgtgatagcgctccgcctcctcggcgc

SEQ ID NO: 37665 - DNA, 260 bp, Unknown; identical to SEQ ID NO: 37510
  Description of Unknown: RightRegion for integrase A233 sequence

SEQ ID NO: 37666 - DNA, 260 bp, Unknown; identical to SEQ ID NO: 24353
  Description of Unknown: RightRegion for integrase A234 sequence

SEQ ID NO: 37667 - DNA, 260 bp, Unknown; identical to SEQ ID NO: 37644
  Description of Unknown: RightRegion for integrase A235 sequence

SEQ ID NO: 37668 - DNA, 260 bp, Unknown
  Description of Unknown: RightRegion for integrase A236 sequence
gtccggaccgtacctgttcgaccttcgcaaccaacgatgctgacacccgccctcgggtcggtcttcggaccggctcgggggctcctttttttgtgcccaaatcccatgcacgatcacgcatgtatcagtattgggggaacgcgatattcgaggagtagaacatcaccttcaccaaattcatgtatcctaccttcgtgcgtgtgttggggagactgcgtctgtcgaggtcaacggaggaatccacctcgattgagaggcaa

SEQ ID NO: 37669 - DNA, 260 bp, Unknown
  Description of Unknown: RightRegion for integrase A237 sequence
tacgagcagcatctcaggctcggcagcgtggtcgaacggctacacaccgggatgtcgtagagcgactgcccccgagaacgcagaaaagccccctacgcgccgtgtaagggcacgcagagggctctctggtagtctctattcagttgtggggttgcgtacgtcagcgtggacgctagaggggtttacggggcctcgtggacccgtacgtacggctgcagaggcttgtcacggtaggcgtggtagcgctcggcctcctcggc

SEQ ID NO: 37670 - DNA, 260 bp, Unknown
  Description of Unknown: RightRegion for integrase A238 sequence
tacgagcagcatctcaggctcggcagcgtggtcgaacggctacacgccgggatgtcgtagagcgactacccccgagaacgcagaaaagccccctacgcgccgtgtaagggcacgcagagggctctctggtagtctctattcagttgtggggttgcgtccgtcagcgtggacgctagaggggtttacggggcctcgtggacccgcacgtacggctgcagaggcttgtcacggtaggcgtgatagcgctcggcctcctcggc

SEQ ID NO: 37671 - DNA, 260 bp, Unknown
  Description of Unknown: RightRegion for integrase A239 sequence
gttcggaccgtacctgttcgaccttcgcaaccaacgatgctgacacccgccctcgggtcggtcttcggaccggctcgggggctcctttttttgtgcccaaatcccatgcacgatcacgcatgtatcagtattgggggaacgcgatattcgaggagtagaacatcaccttcaccaaattcatgtatcctaccttcgtgcgtgtgttggggagactgcgtctgtcgaggtcaacggaggaatccacctcgattgagaggcaa

SEQ ID NO: 37672 - DNA, 260 bp, Unknown
  Description of Unknown: RightRegion for integrase A240 sequence
tacgagcagcatctcaggctcggcagcgtggtcgaacggctacacaccgggatgtcgtagagcggctacccgagaacgcagaaaagccccctacgcgccgtgtaagggcacgcagagggctctctggtagtctctattcagttgtgtggttgcgtccgtcagcgtggacgctagaggggtttacggggcctcgtggacccgtacgtacggctgcagaggcttgtcacggtaggcgtggtagcgctccgcctcctcgacgc

SEQ ID NO: 37673 - DNA, 260 bp, Unknown
  Description of Unknown: RightRegion for integrase A241 sequence
tacgagcagcacctccggctcggtagcgtggtcgaacagctacacaccgggatgtcgtagagcgactacccggagaacgcagaaaagccccctacgcgccgtgtaagggcacgcagagggctctctggtagtctctattcagttgtggggttgcgtccgtcagcgcggacgctagaggggtttacggggcctcgtggacccgtacgtacggctgcagaggcttgtcacggtaggcgtggtagcgctcggcctcctcgacg

SEQ ID NO: 37674 - DNA, 260 bp, Unknown
  Description of Unknown: RightRegion for integrase A242 sequence
tacgagcagcatctcaggctcggcagcgtggtcgaacggctacacaccgggatgtcgtagagcggctacccgagaacgcagaaaagccccctacgcgccgtgtaagggcgcgcagagggctctctggtagtctctattcagttgtggggttgcgtccgtcagcgtggacgctagaggggtttacggggcctcgtggacccgcacgtacggctgcagaggcttgtcacggtaggcgtggtagcgttccgcctcctcggcgc

SEQ ID NO: 37675 - DNA, 260 bp, Unknown
  Description of Unknown: RightRegion for integrase A243 sequence
tacgagcagcatctcaggctcggcagcgtggtcgaacggctacacaccgggatgtcgtagatcgactacccgagaacgcagaaaagccccctacgcgccgtgtaagggcacgcagagggctctctggtagtctctattcagttgtggggttgcgtccgtcagcgtggacgctagaggggtttacggggcctcgtggacccgtacgtacggctgcagaggcttgtcacggtaggcgtgatagcgctcggactcctcggcgc

SEQ ID NO: 37676 - DNA, 260 bp, Unknown; identical to SEQ ID NO: 37650
  Description of Unknown: RightRegion for integrase A244 sequence

SEQ ID NO: 37677 - DNA, 260 bp, Unknown
  Description of Unknown: RightRegion for integrase A245 sequence
tacgagcagcatctcaggctcggcagcgtggtcgaacagctacacgccgggatgtcgtagagcggctacccgagaacgcagaaaagccccctacgcgccgtgtaagggcacgcagagggctctctggtagtctctattcagttgtggggttgcgtccgtcagcgtggacgctagagggggtttacggggcctcgtggacccgcacgtacggctgcagaggcttgtcacggtaggcgtggtatcgctcggcctcctcggcg

SEQ ID NO: 37678 - DNA, 260 bp, Unknown
  Description of Unknown: RightRegion for integrase A246 sequence
tacgagcagcatctcaggctcggcagcgtggtcgagcggctacacaccgggatgtcgtagagcgactacccgagaacgcagaaaagccccctacgcgccgtgtaagggcacgcagagggctctctggcagtctctattcagttgtggggttgcgtccgtcagcgtggacgctagaggggtttacggggcctcgtggacccgcacgtacggctgcagaggcttgtcacggtaggcgtggtagcgttccgcctcctcggcgc

SEQ ID NO: 37679 - DNA, 260 bp, Unknown
  Description of Unknown: RightRegion for integrase A247 sequence
tacgagcagcatctcaggctcggcagcgtggtcgaacggctacacgccgggatgtcgtagagcggctacccgagaacgcagaaaagccccctacgcgccgtgtaagggcacgcagagggctctctggtagtctctattcagttgtgtggttgcgtccgtcagcgtggacgctagaggggtttacggggcctcgtggacccgcacgtacggctgcagaggcttgtcacggtaggcgtggtagcgctcggcctcctcggcgc

SEQ ID NO: 37680 - DNA, 260 bp, Unknown; identical to SEQ ID NO: 37656
  Description of Unknown: RightRegion for integrase A248 sequence

SEQ ID NO: 37681 - DNA, 260 bp, Unknown
  Description of Unknown: RightRegion for integrase A249 sequence
tacgagcagcatctcaggctcggcagcgtggtcgaacggctacacaccgggatgtcgtagagcgactacctgagaatgcagaaaagccccctacgcgccgtgtaagggcacgcagagggctctctggtagtctctattcagttgtggggttgcgtccgtcagcgtggacgctagaggggtttacggggcctcgtggacccgcacgtacggctgcagaggcttgtcacggtaggcgtggtagcgctcggcctcctcggcgc

SEQ ID NO: 37682 - DNA, 260 bp, Unknown
  Description of Unknown: RightRegion for integrase A250 sequence
tacgagcagcacctcaggctcggcagcgtggtcgaacagctacacgccgggatgtcgtagagcgactaccccccgagaacgcagaaaagccccctacgcgccgctagggcacgcagagggcttctccggtagtctctattcagttgtgggtgtgcgtccgtctccgtggacgctagaggggtttacggggcctcgtggacccgcacgtacggctgcagaggcttgtcacggtaggcgtggtagcgctcggcctcctcggc

SEQ ID NO: 37683 - DNA, 260 bp, Unknown
  Description of Unknown: RightRegion for integrase A251 sequence
tccgaccgcgactgttgctgctgcggcaaagctgaccggggatagaatcttcattgcacgggcctcttccgtgtagtagccctctgccagtcctgcgcctaaacagctggtagggggctcttttcgttgttgtggagcgatacggtacaccatttcaagtgtgtttgcttcgggcaaccgagcagcgtacatttgaaatcatgacccaaacactccgcgccctggtaggcgcacgtgtcagcgtagtccaaggtccgcag

SEQ ID NO: 37684 - DNA, 260 bp, Unknown
  Description of Unknown: RightRegion for integrase A252 sequence
tacgagcagcatctcaggctcggcagcgtggtcgaacggctacacgccgggatgtcgtagagcggctacccgagaacgcagaaaagccccctacgcgccgtgtaagggcacgcagagggctctctggtagtctctattcagttgtgtggttgcgtccgtcagcgtggacgctagaggggtttacggggcctcgtggacccgtacgtacggctgcagaggcttgtcacggtaggcgtggtagcgctcggcctcctcggcgc

SEQ ID NO: 37685 - DNA, 260 bp, Unknown
  Description of Unknown: RightRegion for integrase A253 sequence
tccgaccgcgactgttcctgctgtggcaaagctgaccggggatagaatcttcattgcacgggcctcttccgtgtagtagccctctgccagtcctgcgcctaaacagctggtagggggctcttttcgttgttgtggagcgatacggtacaccatttcaagtgtgtttgcttcgggcaaccgagcagcgtacatttgaaatcatgacccaaacactccgcgccctggtaggcgcacgtgtcagcgtagtccaaggtccgcag

SEQ ID NO: 37686 - DNA, 260 bp, Unknown
  Description of Unknown: RightRegion for integrase A254 sequence
tacgagcagcatctcaggctcggcagcgtggtcgaacggctgcacaccgggatgtcgtagagcggctacccgagaacgcagaagagccccctacgcgccgtgtaagggcacgcagagggctctctggtagtctctattcagttgtggggttgcgtccgtcagcgtggacgctagaggggtttacggggcctcgtggacccgcacgtacggctgcagaggcttgtcacggtaggcgtggtatcgctcggcctcctcggcgc

SEQ ID NO: 37687 - DNA, 260 bp, Unknown
  Description of Unknown: RightRegion for integrase A255 sequence
tacgagcagcatctcaggctcggcagcgtggtcgaacagctacacaccgggatgtcgtagagcgcctaccctgagaatgcagaaaagccccctacgcgccgtgtaagggcacgtagagggctctctggtagtctctattcagttgtggggttgcgtccgtcagcgtggacgctagaggggtttacgggtcctcgtggacccgtacgtacggctgcagaggcttgtcacggtaggcgtggtagcgctccgcctcctcggcg

SEQ ID NO: 37688 - DNA, 260 bp, Unknown
  Description of Unknown: RightRegion for integrase A256 sequence
tacgagcagcatctcaggctcggcagcgtggtcgaacagctacacgccgggatgtcgtagagcggctacccgagaacgcagaaaagccccctacgcgccgtgtaagggcacgcagagggctctctggtagtctctattcagttgtggggttgcgtccgtcagcgtggacgctagaggggtttacggggcctcgtggacccgcacgtacggctgcagaggcttgtcacggtaggcgtggtagcgctcggcctcctcggcgc

SEQ ID NO: 37689 - DNA, 260 bp, Unknown
  Description of Unknown: RightRegion for integrase A257 sequence
tacgagcagcacctcaggctcggcggcgtggtcgaacagctacacaccgggatgtcgtagagcgactaccctgagaacgcagaaaaaccccctacgcgccgtgtaagggcacgcagagggctctctggtagtctctattcagttgtgcggttgcgtccgtcagcgtggacgctagaggggtttacggggcctcgtggacccgtacgtacggctgcagaggcttgtcacggtaggcgtggtagcgctcggcctcctcgacg

SEQ ID NO: 37690 - DNA, 260 bp, Unknown
  Description of Unknown: RightRegion for integrase A258 sequence
tccgaccgcgactgttcctgctgtggcaaagctgaccggggatagaatcttcattgcacgggcctcttccgtgtagtagccctctgccagtactgcgcctaaacagctggtagggggctcttttcgttgttgtggagcgatacggtacaccatctcaagtgtgtttgcttcgggcaaccgagcagcgtacatttgaaatcatgacccaaacactccgcgccctggtaggcgcacgtgtcagcgtagtccaaggtccgcag

SEQ ID NO: 37691 - DNA, 260 bp, Unknown
  Description of Unknown: RightRegion for integrase A259 sequence
tacgagcagcatctcaggctcggcagcgtggtcgaacagctgcacgccgggatgtcgtagagcgactacccgagaacgcagaaaagccccctacgcgccgtgtaagggcacgcagagggctctctggtagtctctattcagttgtggggttgcgtccgtcagcgtggacgctagaggggtttacggggcctttccagcctgacgtccgcgccactcctgtaagggtgtgtgagcagtgcagtacgggtctacccggctgc

SEQ ID NO: 37692 - DNA, 260 bp, Unknown
  Description of Unknown: RightRegion for integrase A260 sequence
tacgagcagcatctcaggctcggcagcgtggtcgaacgactacacaccgggatgtcgtagagcggctacccgagaacgcagaaaagccccctacgcgccgtgtaagggcacgcagagggctctctggtagtctctattcagttgtggggttgcgtccgtcagcgtggacgctagaggggtttacggggcctcgtggacccgcacgtacggcggcagaggcttgtcacggtaggcgtggtagcgctctttctcgtcggaga

SEQ ID NO: 37693 - DNA, 260 bp, Unknown
  Description of Unknown: RightRegion for integrase A261 sequence
tacgagcagcatctcaggctcggcagcgtggtcgaacagctacacgccgggatgtcgtagagcggctacctgagaacgcagaaaagccccctacgcgccgtgtaagggcacgcagagggctctctggtagtctctattcagttgtggggttgcgtccgtcagcgtggacgctagaggggtttacgggggcctttccagcctgacgggcgcgcccgcctataagggtgtgtgagcagtgcagtgcgggtctacccagctgc

SEQ ID NO: 37694 - DNA, 260 bp, Unknown
  Description of Unknown: RightRegion for integrase A262 sequence
tacgagcagcatctcaggctcggcagcgtggtcgaacggctacacaccgggatgtcgtagagcggctacccgagaacgcagaaaagccccctacgcgccgtgtaagggcacgcagagggctctctggtagtctctattcagttgtgtggttgcgtccgtcagcgtggacgctagaggggtttacggggcctcgtggacccgcacgtacggctgcagaggcttgtcacggtaggcgtggtagcgctcggcctcctcggcgc

SEQ ID NO: 37695 - DNA, 260 bp, Unknown
  Description of Unknown: RightRegion for integrase A263 sequence
acagtccccgccgtcgcagaccggagcggggtgatctcccgtagaatttccattgcacctggtcctttcaggtgtaacgcctcctaccagtcctgcgcctaaacagctggtagggggctcttttcgttgttgtggagcgatacggtacaccatttcaagtgtgtttgcttcgggcaaccgagcagcgtacatttgaaatcatgacccaaacactccgcgccctggtaggcgcacgtgtcagcgtagtccaaggtccgcag

SEQ ID NO: 37696 - DNA, 260 bp, Unknown
  Description of Unknown: RightRegion for integrase A264 sequence
tacgagcagcatctcaggctcggtagcgtggtcgaacggctacacaccgggatgtcgtagagcggctacccgagaacgcagaaaagccccctacgcgccgtgtaagggcacgcagagggctctctggtagtctctattcagttgtactgctgagtccgtcagcgtggacgctagaggggtttacggggcctcgtggacccgaacgtacggctgcagaggcttgtcacggtaggcgtgatagcgctccgcctcctcggcgc

SEQ ID NO: 37697 - DNA, 260 bp, Unknown
  Description of Unknown: RightRegion for integrase A265 sequence
tatgagcagcatctcaggctcggtagcgtggtcgaacagctacacaccgggatgtcgtagagcgactaccctgagaacgcagaaaagccccctacgcgccgtgtaagggcgcgcagagggctctctggtagtctctattcagttgcggggttgcgtccgtcagcgtggacgctagaggggtttacggggcctcgtggacccgtacgtacggctgcagaggcttgtcacggtaggcgtggtagcgctctgcctcctcggcg

SEQ ID NO: 37698 - DNA, 260 bp, Unknown
  Description of Unknown: RightRegion for integrase A266 sequence
tacgagcagcatctcaggctcggcagcgtggtcgagcagctacacgccgggatgtcgtagagcggctacccgagaacgcagaaaagccctctacgcgccgtgtaagggcgcgcagagggctctctggcagtctctattcagttgtggggttgcgtccgtcagcgtggacgctagaggggtttacggggcctcgtggacccgcacgtacggctgcagaggcttgtcacggtaggcgtggtagcgctcggcctcctcggcgc

SEQ ID NO: 37699 - DNA, 260 bp, Unknown
  Description of Unknown: RightRegion for integrase A267 sequence
tacgagcagcatctcaggctcggcagcgtggtcgagcagctacacgccgggatgtcgtagagcggatacccgagaacgcagaaaagccccctacgcgccgtgtaagggcacgcagagggctctctggtagtctctattcagttgtggggttgcgtccgtcagcgtggacgctagaggggtttacggggcctcgtggacccgtacgtacggctgcagaggcttgtcacggtaggcgtggtagcgctcggcctcctcggcgc

SEQ ID NO: 37700 - DNA, 260 bp, Unknown
  Description of Unknown: RightRegion for integrase A268 sequence
tacgagcagcatctcaggctcggcaacgtggtcgaacggctacacaccgggatgtcgtagagcgactacccgagaacgcagaaaagccccctacgcgccgtgtaagggcacgcagagggctctctggcagtctctattcagttgtggggttgcgtccgtcagcgtggacgctagaggggtttacggggcctcgtggacccgcacgtacggctgcagaggcttgtcacggtaggcgtggtagcgctctttctcgtcggtcg

SEQ ID NO: 37701 - DNA, 260 bp, Unknown; identical to SEQ ID NO: 37698
  Description of Unknown: RightRegion for integrase A269 sequence

SEQ ID NO: 37702 - DNA, 260 bp, Unknown
  Description of Unknown: RightRegion for integrase A270 sequence
gtccagcccagccacgtctccttcgagatggggctacttgtgctggcacgacacggtgagtggctaggtccgtgggtcgcattgggacaaagcccgcagggctagggggacaaggcgagggccacaggtctagccgcccgtagggcgtccttacggtcaggggagcccccgtcaggggtcagtctccaggagcggtagaagtgccaaagtacgatggacgtatgcgtgtgctcggtcgggttcgtctctctcggttccaa

SEQ ID NO: 37703 - DNA, 260 bp, Unknown
  Description of Unknown: RightRegion for integrase A271 sequence
tacgagcagcatctcaggctcggcagcgtggtcgagcagctacacgccgggatgtcgtagagcggctacccgagaacgcagaaaagccccctacgcgccgtgtaagggcgcgcagagggctctctggcagtctctattcagttgtggggttgcgtccgtcagcgtggacgctagaggggtttacggggcctcgtggacccgcacgtacggctgcagaggcttgtcacggtaggcgtggtagcgctcggcctcctcggcgc

SEQ ID NO: 37704 - DNA, 260 bp, Unknown
  Description of Unknown: RightRegion for integrase A272 sequence
tacgagcagcatctcaggctcggcagcgtggtcgagcggctacacaccgggatgtcgtagagcgactgcccccgagaacgcagaaaagccccctacgcgccgtgtaagggcacgcagagggctctctggtagtctctattcagttgtggggttgcgtacgtcagcgtggacgctagaggggtttacggggcctcgtggacccgcacgtacggttgcagaggcttgtcacggtaggcgtggtatcgctcggcctcctcggc

SEQ ID NO: 37705 - DNA, 260 bp, Unknown
  Description of Unknown: RightRegion for integrase A273 sequence
tacgagcagcatctcaggctcggcagcgtggtcgagcggctacacaccgggatgtcgtagagcgactaccctgagaacgcaagaaaagccccctacgcgccgtgtaagggcacgcagagggctctctggtagtctctattcagttgtggggttgcgtccgtcagcgtggacgctagaggggtttacggggcctcgtggacccgcacgtacggcggcagaggcttgtcacggtaggcgtgatagcgctccgcctcctcggc

SEQ ID NO: 37706 - DNA, 260 bp, Unknown
  Description of Unknown: RightRegion for integrase A274 sequence
tacgagcagaatctcaggctcggcaacgtggtcgaacggctacacaccgggatgtcgtagagcgactacccgagaacgcagaaaagccccctacgcgccgtgtaagggcacgcagagggctctctggcagtctctattcagttgtggggttgcgtacgtcagcgtggacgctagaggggtttacggggcctcgtggacccgtacgtacggctgcagaggcttgtcacggtaggcgtggtagcgctcggcctcctcggcgc

SEQ ID NO: 37707 - DNA, 260 bp, Unknown
  Description of Unknown: RightRegion for integrase A275 sequence
tacgagcagcatctcaggctcggcagcgtggtcgaacggctacacaccgggatgtcgtagagcgactacccgagaacgcagaaaagccccctacgcgccgtgtaagggcacgcagagggctctctggtagtctctattcagctgtgggtgtgcgtccgtctccgtggacgctagaggggtttacggggcctcgtggacccgcacgtacggttgcagaggcttgtcacggtaggcgtggtatcgctcggcctcctcggcgc

SEQ ID NO: 37708 - DNA, 260 bp, Unknown
  Description of Unknown: RightRegion for integrase A276 sequence
agtccagcccagccacgtctccttcgagatggggctacttgtgctggcctgacacggtgaggggctaggtccgtgggtcgcattgggacaagcccgcagggctagggggacaaagcgagggccaagagtctagtcgcccgaagggcgtccttacggtcaggggagcccccgtcaggggccaatctccaggagccgttcctatgccaacgtacgatagatccatgcgcgtgataggccgactgagaatctcccgacaaacc

SEQ ID NO: 37709 - DNA, 260 bp, Unknown
  Description of Unknown: RightRegion for integrase A277 sequence
aagctgaacgccagaccgcccacggcaatcgtgcctgccgtagcgacgttgacggacgatagactcttcatgcaccgctcctatcggtgtatcgcctctggtctgttcgcgcaggccaggggctcattctctcagtgaagaatcccgagaatcgggagcccaagtcttatcattcttcactctctgttatgctggctgacatgcgagttcttgggagactcaggatcagccgagccacagaggaatctaccagcatcgag

SEQ ID NO: 37710 - DNA, 260 bp, Unknown
  Description of Unknown: RightRegion for integrase A278 sequence
gagaacgccagacctccgaccgccacggttccggccgtcgcgacacgcacgggggatagactcagcactgcaccagctcctatctggtgtaacgcccctggtctgttcacgcaggccaggggctcttttggttagtgaagaatcccgaaaaacgggagcccgagtttcaacattcttctctccttgctactgtctctgacatgcgagttcttggaagattgcgaatctcacgagccactgaggaatctaccagcatcgag

SEQ ID NO: 37711 - DNA, 260 bp, Unknown; identical to SEQ ID NO: 37624
  Description of Unknown: RightRegion for integrase A279 sequence

SEQ ID NO: 37712 - DNA, 260 bp, Unknown
  Description of Unknown: RightRegion for integrase A280 sequence
gagaacgccagacctccgaccgccacggttccggccgtcgcgacacgcacgggggatagactcagcactgcaccagctcctatctggtgtaacgcccctggtctgttcacgcaggccaggggctcttttggttagtgaagaatcccgaaaaacgggagcccgagtttcaacattcttctctccttgctactgtgtctgacatgcgagttcttggaagattgcgaatttcacgagccactgaggaatctaccagcatcgag

SEQ ID NO: 37713 - DNA, 260 bp, Unknown
  Description of Unknown: RightRegion for integrase A281 sequence
agtccagcccagccacgtctccttcgagatggggctacttgtgctggcctgacacggtgaggggctaggtccgtgggtcgcattgggacaagcccgcagggctagggggacaaagcgagggccaagagtctagccgcccgaagggcgtccttacggtcaggggagcccccgtcaggggccaatctccaggagccgttccgatgccaacgtacgatagatccatgcgcgtgataggccgactgagaatctcccggcaaacc

SEQ ID NO: 37714 - DNA, 260 bp, Unknown
  Description of Unknown: RightRegion for integrase A282 sequence
agaacgccagagcgccgaccgccacggttccggccgtcgcgacacgcacgggggatagaatcgacattgcacgagctcctatctcgtgtaccgcccctggtctgttcgcgcaggccaggggctcttttgacctagtgaataatcccgaaaatcgggagcccgagttttatcattcttcactccttggtaccatgtctgacatgcgagttcttggaagattgcgaatttcccgagccactgaggaatctaccagcatcgag

SEQ ID NO: 37715 - DNA, 260 bp, Unknown; identical to SEQ ID NO: 37627
  Description of Unknown: RightRegion for integrase A283 sequence

SEQ ID NO: 37716 - DNA, 260 bp, Unknown
  Description of Unknown: RightRegion for integrase A284 sequence
agtccagcccagccacgtctcaatcgagatggggctacttgtgctggcctgacacggtgaggggctaggtccgtgggtcgcattgggacaagcccgcagggctagggggacaaagcgagggccaagagtctagtcgcccgaagggcgtccttacggtcaggggagcccccgtcaggggccaatctccaggagccgttcctatgccaacgtacgatagatccatgcgcgtgataggccgactgagaatctcccgacaaacc

SEQ ID NO: 37717 - DNA, 260 bp, Unknown; identical to SEQ ID NO: 37627
  Description of Unknown: RightRegion for integrase A285 sequence

SEQ ID NO: 37718 - DNA, 260 bp, Unknown
  Description of Unknown: RightRegion for integrase A286 sequence
cgagaacgccagacctccgaccgccacggttccggccgtcgcgacacgcacgggggatagactcagcactgcaccagctcctatctggtgtaacgcccctggtctgttcacgcaggccaggggctctttcgttagtgaagaatcccgaaaaacgggagcccgagtttcaacattcttctctccttgctactgtctctgacatgcgagttcttggaagattgcgaatctcacgagccactgaagaatctaccagcatcgag

SEQ ID NO: 37719 - DNA, 260 bp, Unknown; identical to SEQ ID NO: 37627
  Description of Unknown: RightRegion for integrase A287 sequence

SEQ ID NO: 37720 - DNA, 260 bp, Unknown; identical to SEQ ID NO: 37624
  Description of Unknown: RightRegion for integrase A288 sequence

SEQ ID NO: 37721 - DNA, 260 bp, Unknown
  Description of Unknown: RightRegion for integrase A289 sequence
gtccagcccagccacgtctccttcgagatggggctacttgtgctggcacgacacggtgagtggctaggtccgtgggtcgcattgggacaaagcccgcagggctagggggacaaggcgagggccacaggtctagccgcccgtagggcgtccttacggtcaggggagcccccgtcaggggtcagtctccaggagccgcttcaatgccaacgtacgatagatccatgcgcgtgataggccgactaagaatctcccgtcagtcc

SEQ ID NO: 37722 - DNA, 260 bp, Unknown
  Description of Unknown: RightRegion for integrase A290 sequence
gagaacgccagacctccgaccgccacggttccggccgtcgcgacacgcacgggggatagactcagcactgcaccagctcctatctggtgtaacgcccctggtctgttcacgcaggccaggggctcttttggttagtgaagaatcccaaaaaacgggagcccgagtttcaacattcttctctccttgctactgtctctgacatgcgagttcttggaagattgcgaatctcacgagccactgaggaatctaccagcatcgag

SEQ ID NO: 37723 - DNA, 260 bp, Unknown
  Description of Unknown: RightRegion for integrase A291 sequence
ccgttgctgcaaaaatcggggatagaatcttcatgcacctggccctttcaggtgtaccgcccccttcctgttaccgcaggtagggggctctttttctgttgacggtcggttacgctaccacagttgtcaaagtctaaagatggggaactcaatattcatgctttgcgaaagcgctgttctcacggctacactcctctgacatgcgggttcttgggagaatacgactctccagaatgatggaggagtctaccagtgtggaa

SEQ ID NO: 37724 - DNA, 260 bp, Unknown
  Description of Unknown: RightRegion for integrase A292 sequence
ccgttgctgcaaaaatcggggatagaatcttcatgcacctggccctttcaggtgtaccgccctctgcctgttaccgcaggtagggggctctttttctgttgacggtcggttacgctaccacagttgtcaaagcctaaaaatggggaactcgatattcatgctttgcgaaagcgctgttctcacggctacactcctctgacatgcgggttcttgggagaatacgactctccagaatgatggaggagtctaccagtgtggaa

SEQ ID NO: 37725 - DNA, 260 bp, Unknown
  Description of Unknown: RightRegion for integrase A293 sequence
ccgttgctgcaaaaatcggggatagaatcttcatgcacctggccctttcaggtgtaccgccctctgcctgttaccgcaggtagggggctctttttctgttgacggtcggttacgctaccacagttgtcaaagcctaaagatggggaactcgatattcatgctttgcgaaagcgctgttctcacggctacactcctctgacatgcgggttcttgggagaatacgactctccagaatgatggaggagtctaccagtgtggaa

SEQ ID NO: 37726 - DNA, 260 bp, Unknown; identical to SEQ ID NO: 37724
  Description of Unknown: RightRegion for integrase A294 sequence

SEQ ID NO: 37727 - DNA, 260 bp, Unknown; identical to SEQ ID NO: 37724
  Description of Unknown: RightRegion for integrase A295 sequence

SEQ ID NO: 37728 - DNA, 260 bp, Unknown
  Description of Unknown: RightRegion for integrase A296 sequence
ccgttgctgcaaaaatcggggatagaatcttcatgcacctggccctttcaggtgtaccgccctctgcctgttaccgcaggtagggggctctttttctgttgacggtcggttacgttaccacagttgtcaaagcctaaagatggggaactcgatattcatgctttgcgaaagcgctgttctcacggctacactcctctgacatgcgggttcttgggagaatacgactctccagaatgatggaggagtctaccagtgtggaa

SEQ ID NO: 37729 - DNA, 260 bp, Unknown; identical to SEQ ID NO: 37724
  Description of Unknown: RightRegion for integrase A297 sequence

SEQ ID NO: 37730 - DNA, 260 bp, Unknown; identical to SEQ ID NO: 37725
  Description of Unknown: RightRegion for integrase A298 sequence

SEQ ID NO: 37731 - DNA, 260 bp, Unknown; identical to SEQ ID NO: 37725
  Description of Unknown: RightRegion for integrase A299 sequence

SEQ ID NO: 37732 - DNA, 260 bp, Unknown
  Description of Unknown: RightRegion for integrase A300 sequence
ccatgcctgcccggacgaaactccgttgttcgccgccaggtccgacagggccgtgaacgacagcgagaacgccaatcctccgaccagaatggtgcctgcggtcgctgctcctacgggactgaaaaccctcactgaactggcctttcgtcgtgtatcaagtgtgttgtgttccagcaccccagtagtctacacttgagactatggccaaacaactaagagccctggtgggagcacgtgtcagtgtagttcagggaccacag

SEQ ID NO: 37733 - DNA, 260 bp, Unknown
  Description of Unknown: RightRegion for integrase A301 sequence
tacgagcagcacctcaggctcggtagcgtggtcgaacggctacacaccgggatgtcgtagagcgactaccctgagaacgcagaaaagccccctacgggccgctagggctcgcagagggcttctccggtagtctctattcagttgtactgctgagtccgtcagcgtgggcgctagaggggtttacggggcctcgtggacccgcacgtacggctgcagaggcttgtcacggtaggcgtggtagcgctccgcctcctcggcgc

SEQ ID NO: 37734 - DNA, 260 bp, Unknown; identical to SEQ ID NO: 37654
  Description of Unknown: RightRegion for integrase A302 sequence

SEQ ID NO: 37735 - DNA, 260 bp, Unknown; identical to SEQ ID NO: 37661
  Description of Unknown: RightRegion for integrase A303 sequence

SEQ ID NO: 37736 - DNA, 260 bp, Unknown
  Description of Unknown: RightRegion for integrase A304 sequence
atcaaggtctggcatctggtcgccgagcacctcaaccccgacctgatccccgacgtgtaaacgcccctgtgcgtccacggcgacgccggaagggtctgaggagtgcgcctagcgccgccaagatgcgccggggatgctgcccataacggtcgcgtcacgatccatagcgacgaaaggctccttccgcgcgaggtatcatatttcgtccatgacgatctgacgatactttcgtcatttctctatccagcctctaggctctc

SEQ ID NO: 37737 - DNA, 260 bp, Unknown
  Description of Unknown: RightRegion for integrase A305 sequence
ttcgagatggggctacttgtgctggcacgacacggtgagtggctaggtccgtgggtcgcattgggacaaagcccgcagggctagggggacaaggcgagggccaagggtctagccgcccgtagggcgtccttacggtcaggggagcccccgtcaggggtcagtctccaggagccgttccaatgccaacgtacgatagatccatgcgcgtgataggccgactaagaatctcccgacagtccgaggagtctacgtcgatcgac

SEQ ID NO: 37738 - DNA, 260 bp, Unknown
  Description of Unknown: RightRegion for integrase A306 sequence
tacgagcagcatctcaggctcggcagcgtggtcgaacggctacacaccgggatgtcgtagagcggctacccgagaacgcagaaaagccccctacgcgccgtgtaagggcacgcagagggctctctggtagtctctattcagttgtgtggttgcgtccgtcagcgtggacgctagaggggtttacggggcctcgtggacccgcacgtacggctgcagaggcttgtcacggtaggcgtggtagcgctctttctcgtcggaga

SEQ ID NO: 37739 - DNA, 260 bp, Unknown; identical to SEQ ID NO: 37698
  Description of Unknown: RightRegion for integrase A307 sequence

SEQ ID NO: 37740 - DNA, 260 bp, Unknown
  Description of Unknown: RightRegion for integrase A308 sequence
tgttaccgcaggtagggggctttttctgttgtcggacggctacgctaccacagttcgcaaagcctcaaaatcgggaactcgatattcatgctttgtgaaagtgctgtcctcatgcggaactgtaacacgttctagtcgttacaacctcgcatcggtgtttcgatcttcagacgttgcggacctttgatactgtacctgacatgcgagttcttggaagaatacgactctcgcgggtcatggaggaatcgacatcggtcgag

SEQ ID NO: 37741 - DNA, 260 bp, Unknown
  Description of Unknown: RightRegion for integrase A309 sequence
tgttaccgcaggtagggggctttttctgttgtcggacggttacgctaccacagttcgcaaagcctcaaaatcgggaactcgatattcatgctttgtgaaagtgctgtcctcatgcggaactgtaacacgttctagttgttacaacctcacatcggtgtttcgatcttcagacgttgcggacctttgatactgtacctgacatgcgagttcttggaagaatacgactctcgcgggtcatggaagaatcgacatcggtcgag

SEQ ID NO: 37742 - DNA, 260 bp, Unknown; identical to SEQ ID NO: 37740
  Description of Unknown: RightRegion for integrase A310 sequence

SEQ ID NO: 37743 - DNA, 260 bp, Unknown
  Description of Unknown: RightRegion for integrase A311 sequence
tgttaccgcaggtagggggctttttctgttgtcggacggctacgctaccacagttcgcaaagcctcaaaatcgggaactcgatattcatgctttgtgaaagtgctgtcctcatgcggaactgtaacacgttctagtcgttacaacctcgcatcggtgtttcgatcttcagacgttgcggacctttgatactgtacctgacatgcgagttcttggaagaatacgactctcgcgggtcatggaggaatcgacatcagtcgag

SEQ ID NO: 37744 - DNA, 260 bp, Unknown
  Description of Unknown: RightRegion for integrase A312 sequence
tgttaccgcaggtagggggctttttctgttgtcggacggctacgctaccacagttcgcaaagcctcaaaatcgggaactcgatattcatgctttgtgaaagtgctgtcctcatggggaactgtaacacgttctagtcgttacaacctcgcatcggtgtttcgatcttcagacgttgcggacctttgatactgtacctgacatgcgagttcttggaagaatacgactctcgcgggtcatggaggaatcgacatcggtcgag

SEQ ID NO: 37745 - DNA, 260 bp, Unknown; identical to SEQ ID NO: 37743
  Description of Unknown: RightRegion for integrase A313 sequence

SEQ ID NO: 37746 - DNA, 260 bp, Unknown; identical to SEQ ID NO: 37740
  Description of Unknown: RightRegion for integrase A314 sequence

SEQ ID NO: 37747 - DNA, 260 bp, Unknown
  Description of Unknown: RightRegion for integrase A315 sequence
ccgggggcggggctaccagtgctggcctgacacgataggggcttggctcgtgggtcgcatggcgggaaaagcccgcagggctaggggggaccaagcgggccaaagggctagccgcccgtagggcgtccttgcggtcaggggagccccccgcagggggtcagtttccagggagtgtccccgtgcaaacgtacgataggcccatgcgtgtgctgggtcgagtccgtctgtcgaggttcaacgaggagtccacctcggtagaa

SEQ ID NO: 37748 - DNA, 260 bp, Unknown
  Description of Unknown: RightRegion for integrase A316 sequence
accgccacggttccggccgtcgcgacacgcacgggggatagactcagcactgcaccagctcctatctggtgtaacgcccctggtctgttcacgcaggccaggggctcttttcattagtgaagaatcccgaaaaacgggagcccgagtttcaacattcttctctccttgctactgtctctgacatgcgagttcttggaagattgcgaatctcacgagccactgaggaatctaccagcatcgagcggcagcgcgagatcgtg

SEQ ID NO: 37749 - DNA, 260 bp, Unknown
  Description of Unknown: RightRegion for integrase A317 sequence
accgccacggttccggccgtcgcgacacgcacgggggatagactcagcactgcaccagctcctatctggtgtaacgcccctggtctgttcacgcaggccaggggctcttttcggtagtgaagaatcccgaaaaacgggagcccgagtttcaacattcttctctccttgctactgtctctgacatgcgagttcttggaagattgcgaatctcacgagccactgaggaatctaccagcatcgagcggcagcgcgagatcgtg

SEQ ID NO: 37750 - DNA, 260 bp, Unknown
  Description of Unknown: RightRegion for integrase A318 sequence
accgccacggttccggctgtcgcgacacgcacgggggatagaatcgacattgcacgagctcctatctcgtgtatcgcccctggtctgttcgcgcaggccaggggctctttgacctagtgaagaatcccaaaaatcgggagcccgagtttcaacattcttctctccttgctactgtgtctgacatgcgagttcttggaagattgcgaatttcacgagccactgaggaatctaccagcatcgagcggcagcgcgagatcgtg

SEQ ID NO: 37751 - DNA, 260 bp, Unknown
  Description of Unknown: RightRegion for integrase A319 sequence
aatcgagatggggctacttgtgctggcctgacacggtgaggggctaggtccgtgggtcgcattgggacaagcccgcagggctagggggacaaagcgagggccacaggtctagccgcccgtagggcgtccttacggtcaggggagcccccgtcaggggtcagtctccaggagcggtagaagtgccaaagtacgatggacgtatgcgtgtgctcggtcgggttcgtctctctcggttccaagaagaatctacgtcggtcgaa

SEQ ID NO: 37752 - DNA, 260 bp, Unknown
  Description of Unknown: RightRegion for integrase A320 sequence
tctacttttgaaaagataacaattgataatggagaaataataaagataatatttaggtaaaatgcgacaaaaaaggcattttttaacattttttaatataatatgatataataattatgaagttattggtggtaatggcggtatcggtagtacaacatattattaaataggaggtaaaaatgaataaagatgctgaatcatctcaaaaaaacaagcaaggtgatttaaatataaagcaaaaaatgtctgaaataaatgat

SEQ ID NO: 37753 - DNA, 88 bp, Unknown
  Description of Unknown: RightRegion for integrase A321 sequence
acaagaatagaagtaagtcaagatggtgtgataaacatcgtatatagatttgaagaataatatttttatccttattgacatatgagga

SEQ ID NO: 37754 - DNA, 260 bp, Unknown
  Description of Unknown: RightRegion for integrase A322 sequence
ataagttaaccgtaaaatattcctgaggtgatgcgaatgatagtgattaaattacttgtaactgaagaagacttagacttattaaaagattttggatttattttctgggatgaacgaaaacttactcaagaagaactttataattattataagtttttactttcattacagaaggtttctaaggagggaagcgaagaatcatgaaaaaagctgctgcttatgcgagagtttcgacaaaggatcaatcaaaaatttcaatt

SEQ ID NO: 37755 - DNA, 260 bp, Unknown
  Description of Unknown: RightRegion for integrase A323 sequence
gcatcgtgttggggttgctacaaaccacccctgttgaagttcgagtaaccaatggccctcgggcggtcccatcacgggatcgcctgggggcctttttctttgaccaacatatgcacgtattcgcatacatgctttgttgaagcccgaacttgtagcacccgatgttcggacaatgtaaaacctgtgataccgtacctgacatgcgtgttcttgggagaatccgactgtccaggctcagcgacgaatctaccagtccggag

SEQ ID NO: 37756 - DNA, 260 bp, Unknown
  Description of Unknown: RightRegion for integrase A324 sequence
tcttcgtggcgatcaacaacagcgggaagacccaaacggtctaccgctgaccccgacctccgggctggccttcgggctggcccgggggtcttttttttgtgcctgacacatgcacgtattcgcatacgttgattgtagaatccccgaacttcgatcagtccatgttcggggtttgtgcaacctctgctatcgtctctgacatgcgtgttcttgggagaatcaggctgtccaggctcagcgacgaatctaccagtcccgag

SEQ ID NO: 37757 - DNA, 260 bp, Unknown
  Description of Unknown: RightRegion for integrase A325 sequence
gagccggtaagtagtgagtacggttccaaaaagaagggcgggagaaatcccgcccgatagtccaaacaatcaaggaacctcgtaaatgaaagacgtgaataacacaataggcaatcgtgcagccaatgtttgggagcgcccattgactggccccgaactgactgccaaccgcacccagcaggatattgatacatggtgggcgctgattgaccggcttttgcctgtggtgactgtcaacaaatggagcaagatcgaaaccg

SEQ ID NO: 37758 - DNA, 260 bp, Unknown
  Description of Unknown: RightRegion for integrase A326 sequence
acccgtcccctcgggctggccttcgggctggcccggggggtctttttttgtgcctgactcatgcacatattcgcatatgtcttcgtatcgaacgccgtcgtcaatctgacgctgccgttccttgtccatgccgccacgctacgcgggagtggttgaaggtccgcaagatgcgacgattcgcacctgttacagttaccaccatgcgtgtgctgggaagagtgaggttgtcgcggttttctgacgagtctacgtctgtcgag

SEQ ID NO: 37759 - DNA, 260 bp, Unknown
  Description of Unknown: RightRegion for integrase A327 sequence
tacgagtgccggtgcggtggattccacctgtctgacgctcgccgtgtcgtcgctctcggcggctagaagagggaccaggccgggtgcactcgagggggtgcatccggccaccccttttttgtctcaaattacatagtttccctacctaacatgtttgggtgccctttatctacctgcatcaatgcagtaagatggcacccatgacagcaacccttgagaccccaccacaggtcgtcgcgccgccccggctgagggctgcg

SEQ ID NO: 37760 - DNA, 260 bp, Unknown
  Description of Unknown: RightRegion for integrase A328 sequence
tacgagtgccggtgcggtggattccacctgtctgacgctcgccgtgtcgtcgctctcggcggctagaagagggaccaggccgggtgcactcgagggggtgcatccggccaccccttttttgtctcaaattacatagttttcctacctaacatgtttgggtgccctttatctacctgcatcaatgcagtaagatggcacccatgacagcaacccttgagaccccaccacaggtcgtcgcgccgccccggctgagggctgcg

SEQ ID NO: 37761 - DNA, 260 bp, Unknown; identical to SEQ ID NO: 25656
  Description of Unknown: RightRegion for integrase A329 sequence

SEQ ID NO: 37762 - DNA, 260 bp, Unknown
  Description of Unknown: RightRegion for integrase A330 sequence
tgcctcaatggttaaacttgttggtttagctgtttgctgaatcatctattttacctctttatattctacttttaacgcgggattcatgagacaacgactttaaacctatataagcactctatttaatttttgtctatcagtttgtatacagttatgtataatactatgggcaaaaataaactaatcaggctgcgttatctatggttactggattaacagattatagtgactgcgtgggttattgtcgggtttctactcaa

SEQ ID NO: 37763 - DNA, 260 bp, Unknown
  Description of Unknown: RightRegion for integrase A331 sequence
aagaaaatcacacttagtaaggataagtatatcgacatcgaatatacattttctttatagttttaaagttggttattagttactgtgatatttatcacggtacccaataaccaatgaatatttgataaattgaacatttttagtaaacaatattttctcaatatgagaattgcgctttacagaacacatgctctcattaatgtgataaaatattctgtaaatataatggaaaaagtgttgcttattgaaatgaagggggt

SEQ ID NO: 37764 - DNA, 260 bp, Unknown; identical to SEQ ID NO: 37763
  Description of Unknown: RightRegion for integrase A332 sequence

SEQ ID NO: 37765 - DNA, 260 bp, Unknown
  Description of Unknown: RightRegion for integrase A333 sequence
ggtgcggggtgtggcacgtgtctgatgctcgccgggtccgcgttctagggaaagtgagctaaccagaccgggaggtcgagtgcagtcgagggggctgcgctcgacctcccttttttatttgtctcaaattacttagtttgtctatctatgttgtttcggtgcccttcaaaaacaccgttcaacctggtaagatggcacctatgacagcgaccctcgagcgacacctcgacaccccgcagcaggaggccctgcgggtgggt

SEQ ID NO: 37766 - DNA, 260 bp, Unknown
  Description of Unknown: RightRegion for integrase A334 sequence
gctggccgatggagggcttcgggaccaccgagtgtcaactcgaggccctgaggatgatgggtcagtaaaagagagggggtcgggtgcagtcgaggggctgcatccggcccttttttatttgccaaaaattagttagttcggcttcctatattgtttcggtgcccttcaaatacaagctccaacctgctaagatggcacctatgacagcaaccctcgagcgacacctcgacaccccgcagcaggaggccctgcgggtgggt

SEQ ID NO: 37767 - DNA, 260 bp, Unknown; identical to SEQ ID NO: 24374
  Description of Unknown: RightRegion for integrase A335 sequence

SEQ ID NO: 37768 - DNA, 260 bp, Unknown
  Description of Unknown: RightRegion for integrase A336 sequence
atgaaaatatattaaaatattcctgaggtgatgcaaatgatagtaattaaattacttgtaactgaagaagacttagacttattaaaagattttggatttattttctgggatgaacgaaaacttacacaagaagaactttataattattataagtttttgctttcattgcagaaggtttctaaggagggaagcgaagaatcatgaaaaaagctactgcttatgcaagagtttcgactaccgaacaatcaaaaacaagtatc

SEQ ID NO: 37769 - DNA, 260 bp, Unknown
  Description of Unknown: RightRegion for integrase A337 sequence
cgagacggtaagaagggcggccccttcgatcccgcccgagtagagccagtcttcgcgtaaacgcaacaaggcccctccccccgaggcgtcagcatcgctgatgccgactagggagaggggctcaatcatgtcttacttcagcttcatcaactcaaggatctcgtccgcagtttcctcatcaagttcaggagcctcggagagccacttctcaagccactcctcttggctcactcatcctccagctcagtcagaggacccca

SEQ ID NO: 37770 - DNA, 260 bp, Unknown
  Description of Unknown: RightRegion for integrase A338 sequence
aagaaaatcacacttagtaaagataagtatatcgatatcgaatatacattttctttatagttttaaagttggttattaggtactgtgacatttattacggtaaccaataaccaacgaatttctgagaagttgaacatttttagtaaacaatattttctcaatatgagaatcgtgctttgcagaacacatgctctcattaatgtgataaaatattctgtaaatataatggaaaaagtgttgcttattgaaatgaagggggt

SEQ ID NO: 37771 - DNA, 260 bp, Unknown
  Description of Unknown: RightRegion for integrase A339 sequence
aagcagcctacaacaaggtttaccataaaactacatttggtctatctgacgttttaaaattgtttaaataaaacaaaaaagcccacgctcaaattttggacgaggagagcgtgagctaaataattggtagtatagtaaaagcctgcttttagtagggctatttactatacccattttaacaagaaatgaggtataaatcaatgcaaacaaagaaagtagcaatctatgtccgtgtgtcatcattacaccaagctatcgaa

SEQ ID NO: 37772 - DNA, 260 bp, Unknown
  Description of Unknown: RightRegion for integrase A340 sequence
tttcttaacagttatcttagctcttgtcggtcttattacttagtttgtcccatatattacaaatttaatcaaaaaaataaaaaagtccatatgctcacttagtttggcgactcagagcataggactattagaatagtaataaacctgcattgtaggttcttttactattctcattttaacaaaaaatgaggagtaaaacaatgaataaagttgctatctatgtgcgcgtaagcacaacaatgcaagctgaagaagggtac

SEQ ID NO: 37773 - DNA, 260 bp, Unknown
  Description of Unknown: RightRegion for integrase A341 sequence
aagagaaatttaatgttatgacatctagagaagacggtataattgaattagatttagaatttgatgaagacaaataaaaaaagccccacgctcaaattttggccaaggagagcgtgaggcaaattctagtatagtaaaaacctgctttttgggaggggcttttaccatacccattttaacagaaaaatgaggtgaaaacaatgaataaagttgctatctatgtgcgtgtgagtacaactatgcaagcagaagaggggtac

SEQ ID NO: 37774 - DNA, 260 bp, Unknown
  Description of Unknown: RightRegion for integrase A342 sequence
cccataacgttaaagcggctgtatcttgcagtcgcttgtttttttgtaaaagaaaaaagcctcatactctccacgaccaaattttgagtataagacttaacttgttgaaataaaccaaaaccactaaattattcattagggtataggtctttttctataccctattttatcataaaacctacaaaatagggagaagaacaatgaataaagttgctatctatgtgcgtgtgagtaccactatgcaagcagaagaagggtac

SEQ ID NO: 37775 - DNA, 260 bp, Unknown
  Description of Unknown: RightRegion for integrase A343 sequence
gaaagcagcttataacaaggtttatcataagactacatttggtctatctgacattttaaaattgtttaaataaacaaaaaagcctcacgctctgagtcgccaaactagagagcatgaagcgaataagtatgtataagaaaacagccattaaatgggcctttttcttatacccattttaacaagaaatgaggtataaatcaatgcaaccaaagaaagtagcaatctatgtccgtgtgtcatcattacaccaagctatcgaa

SEQ ID NO: 37776 - DNA, 260 bp, Unknown
  Description of Unknown: RightRegion for integrase A344 sequence
actatggagaggatatgtggattgacgtttttcttaaacggattaactttgctataaagtatacaaaataaaaaagccttacgctccccagacggcaatcttggagcataaggctacactacaagaaatcaggcattaaaaagccctttttcttgtacctattttaccattttttaggaaattttgaaagaggtactactatgatgacaacaaataaagtggcaatctatgtcagagtatcgactactaaccaggctgag

SEQ ID NO: 37777 - DNA, 260 bp, Unknown
  Description of Unknown: RightRegion for integrase A345 sequence
aagcaaactacgcaattcaacacttgaatgattaacacatgcccttatgggcgtacataatagacaatgaagtctttaaaataagacaaataaaaaagcacaccatatccgaccaaagacataggtgtgcttgaattttcaaacgcatggagcgttctatttaattatatcagagcgcccctttttaaggaggcttttttatgaacaaaaaagtggcactatatgttcgcgtgtctactttagaacaagcggaaagtggc

SEQ ID NO: 37778 - DNA, 260 bp, Unknown
  Description of Unknown: RightRegion for integrase A346 sequence
acgaagacggcggaggatttacaaaatcagaagttaagtatgctatgaaacatttagaggacgaagattaaaaaaagctcacgctctcaaagtttggcgactcagagcgtgagcgaggaagtataagaaagtaagcattaaaaagctgtctttcttgtacctattttatcattttttaataaattttgaaagagggtacaatgatgaacacaatcaacaaggttgctatttacgtacgtgtatcaacaaacgtgcaggca

SEQ ID NO: 37779 - DNA, 60 bp, Unknown; identical to SEQ ID NO: 24789
  Description of Unknown: RightRegion for integrase A347 sequence

SEQ ID NO: 37780 - DNA, 60 bp, Unknown; identical to SEQ ID NO: 24789
  Description of Unknown: RightRegion for integrase A348 sequence

SEQ ID NO: 37781 - DNA, 60 bp, Unknown
  Description of Unknown: RightRegion for integrase A349 sequence
gggcttataaacaaggttcaggtaacagctgaggacattgttatcaagtggaaaatataa

SEQ ID NO: 37782 - DNA, 153 bp, Unknown
  Description of Unknown: RightRegion for integrase A350 sequence
aggcttataaacaaggttaaggtgacagctgaggacattgttatcaattggaaaatataaataattttagtaacctacatttcaatcaaggatagtaaaactctcactcttttctatctcatacatccttaccgaatgcaacacgagatcacg

SEQ ID NO: 37783 - DNA, 76 bp, Unknown
  Description of Unknown: RightRegion for integrase A351 sequence
aggcttataaacaaggttaaggtgacagctgaggacattgttatcaattggaaaatataaataattttagtaacct

SEQ ID NO: 37784 - DNA, 153 bp, Unknown
  Description of Unknown: RightRegion for integrase A352 sequence
gggcttataaacaaggttcaggtaacagctgaggacattgttatcaattggaaaatataaataattttagtaacctacatttcaatcaaggatagtaaaactctcactcttttctatctcatacatccttaccgaatgcaacacgagatcacg

SEQ ID NO: 37785 - DNA, 260 bp, Unknown
  Description of Unknown: RightRegion for integrase A353 sequence
cccggcccggggtttgacccgtcgagtgtgcggttcgtgtggggccgatctgcagattgacgctcggcatgcaccgatgcgcacgcgtcggcgggtgttttagggtgcccgcacggcggtgcgtcgaagtgtgcatcgcagcacaattgaatacatacaacagaatagagcccggcaaatgcgcacgatcagcgttgaagagtacgccgaacaggtcgccgcggcggcaccgccgttgacggacgcgcagcgtggacggc

SEQ ID NO: 37786 - DNA, 260 bp, Unknown
  Description of Unknown: RightRegion for integrase A354 sequence
cgcggtccggggttcgacccgtcgagtgtgcggttcgtgtggggccgatctgcagattgacgctcggcatgcaccgacgcgcacgcgtcggtgcgtgttttagggtgccgcacggcggtgcgtcgaagtgtgcaccgcagcacaattgaatacatacaacagaatagagcctgacaaatgcgcacgatcagcgttgaagagtacgccgaacaggtcgccgcggcggcaccgccattgacggacgcgcagcgtggacggct

SEQ ID NO: 37787 - DNA, 260 bp, Unknown; identical to SEQ ID NO: 37763
  Description of Unknown: RightRegion for integrase A355 sequence

SEQ ID NO: 37788 - DNA, 260 bp, Unknown
  Description of Unknown: RightRegion for integrase A356 sequence
cggctacgctaccacagttcgcaaagcctcaaaatcgggaactcgatattcatgctttgtgaaagtgctgtcttcatgcggaactgtaacacgttctagttgttacagcctcacatcggtgactcgatcttaagacgttgcgaacctctgatactgtacctgacatgcgagttcttggaagaatacgactctcgcgggtcatggaggagtcgacatcggtcgaacgacagcgagagatcatcgagacctgggcgcgtcag

SEQ ID NO: 37789 - DNA, 260 bp, Unknown
  Description of Unknown: RightRegion for integrase A357 sequence
agagtaaatgacctgaaagaaaaattgatcatcttacaagacagagtagatgataatatataacaaacaaaaaagccccacgctctcaaactttggcgagtctgagcgtgaggctatgagcaagaaaggattttcatggagataacctcgcatgatgtcttttcttgtacctattttatcaaaaaaggggtacaaattcaatgaaaacaatgaataaagtggctatatatgtcagagtatctactacctcacaggttgag

SEQ ID NO: 37790 - DNA, 260 bp, Unknown; identical to SEQ ID NO: 24779
  Description of Unknown: RightRegion for integrase A358 sequence

SEQ ID NO: 37791 - DNA, 260 bp, Unknown
  Description of Unknown: RightRegion for integrase A359 sequence
agagtaaatgacctgaaagaaaaattgatcatcttacaagacagagtagatgataatatataacaaacaaaaaagccccacgctctcaaactttggcgagtctgagcgtgaggctatgagcaagaaaggattttcatggagataacctcgcatgatgtcttttcttgtacctattttatcaaaaaaggggtacaaattcaatgaaaacaatgaataaagtggctatatatgtcagggtatcgacgacaaaccaggttgag

SEQ ID NO: 37792 - DNA, 260 bp, Unknown
  Description of Unknown: RightRegion for integrase A360 sequence
aagaaaatcacacttagtaagaataagtatatcgacatcgaatatacattttctttatagttttaaagttggttattagttaccgtgatatttatcacggtacccaataaccaatgaatatttgataaattgaacatttttagtaaacaatattttctcaatatgagaattgcgctttacagaacacatgctctcattaatgtgataaaatattctgtaaatataatggaaaaagtgttgcttattgaaatgaagggggt

SEQ ID NO: 37793 - DNA, 260 bp, Unknown
  Description of Unknown: RightRegion for integrase A361 sequence
cggctacgctaccacagttcgcaaagcctcaaaatcgggaactcgatattcatgctttgtgaaagtgctgtcctcatgcggaactgtaacacgttctagtcgttacaacctcgcatcggtgtttcgatcttcagacgttgcggacctttgatactgtacctgacatgcgagttcttggaagaatacgactctcgcgggtcatggaggaatcgacatcggtcgagaggcagcgagagatcatcgagacctgggcgcgtcag

SEQ ID NO: 37794 - DNA, 76 bp, Unknown
  Description of Unknown: RightRegion for integrase A362 sequence
gggcttataaacaaggttcaggtaacagctgaggacattgttatcaattggaaaatataaataattttagtaacct

SEQ ID NO: 37795 - DNA, 76 bp, Unknown; identical to SEQ ID NO: 37794
  Description of Unknown: RightRegion for integrase A363 sequence

SEQ ID NO: 37796 - DNA, 76 bp, Unknown; identical to SEQ ID NO: 37783
  Description of Unknown: RightRegion for integrase A364 sequence

SEQ ID NO: 37797 - DNA, 260 bp, Unknown
  Description of Unknown: RightRegion for integrase A365 sequence
cgtggcccggggttcgacccgtcgagtgtgcggttcgtgtggggccgatctgcagattgacgctcggcatgcaccgacgcgcgcgcgtcggtgcgtgttttagggtgccgcacggcggtgcgtcgaagtgtgcaccgcagcacaattgaatacatacaacagaatagagccaggcaaatgcgcacgatcagcgttgaagagtacgccgaacaggtcgtcgcggcggcaccgccgttgacggacgcgcagcgcggacggtt

SEQ ID NO: 37798 - DNA, 260 bp, Unknown
  Description of Unknown: RightRegion for integrase A366 sequence
tacacatcaaaacagatgatggaaactcacttgtttcacaaaagatgagcggtgagatgagagtgaaagttaaataaaacaaaaaagccccacgctcaaattttggtcgatgagagcgtgaggcgaatctagtacaagaaaaaagcattaaatggcttgttttcttgtacctattttatcaaaaaaggggtacaaaaacaatgattacaacaaataaggtagctatctatgtcagagtatcgacgactaaccaagctgag

SEQ ID NO: 37799 - DNA, 260 bp, Unknown
  Description of Unknown: RightRegion for integrase A367 sequence
atggaaattcacttgcatctcaaaaaatgaacggcgagatggaagttaaataaaataaaaataaataaaaaatcctcatgttcaaagtttggcgacggtgaacacgaggaaaggaagtatacaagaaaatagccattaaacgggcaattttcttgtacctattttatcattttttaacgaattttgaaagagggtacaatatgaatgcaatcaataaagttgctatttacgtacgtgtatcaacaaacgtgcaggcagaa

SEQ ID NO: 37800 - DNA, 260 bp, Unknown
  Description of Unknown: RightRegion for integrase A368 sequence
gttgcaaattatgccaacgagattttagaagtaatcaagaaattctcataaaacaaaaaagccccacgctctcaaactttggcgagtctgagcgtgaggctagtacttacaagaaaaacttttcaaaagagattgccttttgagatgttttcttgtacccattttatcattttttaggaaattttgaaagaggtactactatgataacaacaaataaagtagctatatatgttagggtgtctaccacatctcaggcagaa

SEQ ID NO: 37801 - DNA, 260 bp, Unknown
  Description of Unknown: RightRegion for integrase A369 sequence
tacacatcaaaacagaggatggaaactcacttgtttcacaaaagatgagcggtgagatgagagtgaaagttaaataaaacaaaaaagccccacgctcaaattttggtcgatgagagcgtgaggcgaatctagtacaagaaaaaagcattaaatggcttgttttcttgtacctattttatcaaaaaaggggtacaaaaacaatgattacaacaaataaggtagctatctatgtcagagtatcgacgactaaccaagctgag

SEQ ID NO: 37802 - DNA, 260 bp, Unknown
  Description of Unknown: RightRegion for integrase A370 sequence
ttaaagcgagtgtataaatccggggatactattattctacaaagcgaaaacccggcgtacaagcctatcatcctgcataaagacgatatgaaaaatgtaaggatcataggcaaactgaaaaaagtagtcctaaatttctagcgctagaaatttagacgggcgggcgacggctcgcccatcttttttaggagggaacaggtatgcgaaccgcattgtatatccgcgtgagcacggaagaccaagcgcgggaggggtattcc

SEQ ID NO: 37803 - DNA, 260 bp, Unknown
  Description of Unknown: RightRegion for integrase A371 sequence
aagaaaatcacacttagtaaggataagtatatcgacatcgaatatacattttctttatagttttaaagttggttattagttactgtgacatttgttacggtaaccaataaccaacgcacatacaaatcgaagctccgggaaattggatgtttttaataaacaaaactttctcaacacgagaatcttggatgtagaacacatgctctgattaatatggtaaaatattctgtaaatataatgggagctatggcgcttatcga

SEQ ID NO: 37804 - DNA, 260 bp, Unknown
  Description of Unknown: RightRegion for integrase A372 sequence
gccttgataagcaaggttcgagttactagtgaaactatcgttattttatggaaattatagagcgttttagtgacattcatttcaatcaaggatactaaaattcttgattcgagcataaaaaagactcattaatgcttagccttttttgaaatggtataataaaacaaaaaggagaaatcgagatggatgtttgtaaacacacaatagagatttatgatgacaaaaccaaagatatagaaacattgctttttgccaaagtg

SEQ ID NO: 37805 - skipped

SEQ ID NO: 37806 - DNA, 260 bp, Unknown
  Description of Unknown: RightRegion for integrase A374 sequence
aaaagaaagattacttgaatatagagataaatttgaagatgacactataaaattaatagatattttatacaatagctaaaaaaagccccacgctccaaccgaccaaagcgaagcacgaggcaaatctagtatagtaaaaacctaatttgttaggtctttttactatacccattttaacatagaaatgaggtataaatcaaatggctaaagtagcaatttacacaagagtaagcacgactttgcaggcagacgaaggttat

SEQ ID NO: 37807 - DNA, 260 bp, Unknown
  Description of Unknown: RightRegion for integrase A375 sequence
aagataccatctaacaaagtactagaaagggcaaaaatacttgaaatagagtttaattaacttttttactgtctattatacaaacaggcagtactgttagaataatgggcacgaaatctcttctcatctgatttaactcccctcaaacgaggggatttttttatgcaaaaaaaattttaaaaagctattgactgatacgaattcgtatcatataataaaatcagaaagtgatacgaattcgtatcaaaagttataaaagg

SEQ ID NO: 37808 - DNA, 260 bp, Unknown
  Description of Unknown: RightRegion for integrase A376 sequence
taccgccctctgcctgttaccgcaggtagggggctctttttctgttgacggtcggttacgctaccacagttgtcaaagcctaaagatggggaactcgatattcatgctttgcgaaagcgctgttctcacggctacactcctctgacatgcgggttcttgggagaatacgactctccagaatgatggaggagtctaccagtgtggaacgccaacgtgagttcatcgagacgtgggcgcggcagaacgatcacgaaatcgtc

SEQ ID NO: 37809 - DNA, 260 bp, Unknown
  Description of Unknown: RightRegion for integrase A377 sequence
acgtgtttttcaaaccaagaaataataaataaatacaaaaaaggcccatgctctcctcgaccaaaatttgagcatggaacctaaaccaatttgaaaaataacctaccgactatttggaatgacacaaaatccaaacagggtataggcctttttcctataccctattttatcataaaacctacaaaatagggaggaaaataatgaataaagtggcaatatatgtccgagttagtacaaaaggacaagcagatgaaggatat

SEQ ID NO: 37810 - DNA, 260 bp, Unknown; identical to SEQ ID NO: 23769
  Description of Unknown: RightRegion for integrase A378 sequence

SEQ ID NO: 37811 - DNA, 260 bp, Unknown
  Description of Unknown: RightRegion for integrase A379 sequence
atgaggatcaggtattgatattcagtcccgagtctacaatcactaagtttagggatgtagtaattccgtttgatacccaaaacgaattaaagatacatggcaaggtagtattatattcagttacattagattaaacgttaacgttaatatttaatcataggcgggccgatcacccgccttcttttataggagttgaagtaatgaaaacagctgtatacattcgggtatcgacagatgaacaagtaaacgaagggtattca

SEQ ID NO: 37812 - DNA, 260 bp, Unknown; identical to SEQ ID NO: 24381
  Description of Unknown: RightRegion for integrase A380 sequence

SEQ ID NO: 37813 - DNA, 260 bp, Unknown
  Description of Unknown: RightRegion for integrase A381 sequence
ggaggttttacaaaatcagaagtcaactacgctattaaacatttagaagacgaagattaaaataaacaaaaaagcccacgctctcaaagtttggcgactcagaacgtgagctaggaagtatacaagaaaaagccattaaatgggcgtttttcttgtacccattttatcatttttcaacgataattgaaagaggtacaaatatgaacaaagtagctatctatgtacgtgtatcaactactaaccaagccgaggaaggctat

SEQ ID NO: 37814 - DNA, 260 bp, Unknown
  Description of Unknown: RightRegion for integrase A382 sequence
ggttattgtttcgtttggttctgcaattatcggcgcaattgttagttatgtcataattaaatattttaaatagaaaataaaaaaatccacatgctcaactttggtcggtgcgagcatgcggatgaattagaatagtaaagaacctgcgtttgtaggctgttttactattcccattttaacatgaaatgaggagtaaaacaatgaacaaagtagcaatttatgttagagtttccacaactaaccaagcagatgagggatat

SEQ ID NO: 37815 - DNA, 260 bp, Unknown
  Description of Unknown: RightRegion for integrase A383 sequence
tatgataatatccaactcgcagaaaacatgagaacaattggtgaggttgtggatatctatagagaaaattaaaaaagccccacgctcagaagtttggcgaccgagagcgtgaggcaagctacaagaaagatttttcaaaagatagtgtcttttgaactcttttcttgtacccattttatcagaaaagaggtacaaatacaatgaaaacaacgaataaagtggcaatctatgttagggtctccactacctcgcaagctgaa

SEQ ID NO: 37816 - DNA, 260 bp, Unknown
  Description of Unknown: RightRegion for integrase A384 sequence
cgatcaccagggggaccatccatgcgtgggccaccccgttgtcggccgccagctcactgagcgcagtgaaggacagtgagaatgccagggccccaacggcaatcgtgcctgacgtggcgatacggaccgcgttgatcttcatcatgtctacagaccctatacggcgacaactccttgtcaagttgttgtagactcgtgtcgtggcaggtcaacgagttctggggcgtattcgcctctcgcgtctcaccgaagagtcgacc

SEQ ID NO: 37817 - DNA, 260 bp, Unknown
  Description of Unknown: RightRegion for integrase A385 sequence
gacccgtctctcatcgagatccgtaggcgcttcccagaagaggccccgaatggcctctagctcgcgggggccgagggtgccgaactcgctgacaaccttctcggcgtattcatcgagagatattgccatgtgtgaaagtttgccaggttccggtggtaacgtgtggcaaaccctgtagcatggctaagcatttgggcataagaaaaggggcacagccgatttggctggccccttctcttttgggtgggtggctaccggtt

SEQ ID NO: 37818 - DNA, 260 bp, Unknown
  Description of Unknown: RightRegion for integrase A386 sequence
ttgtctctcaaaagatgaacggagagatgaaagtcaaagtaaaataagaacaaaacaaaaaagccccacgctctctaagtttggcgactcagagcgtgaggctagtgacaagaaaaactttttcagaagatagtatcttttgagaggttttcttgtaccaattttatcatttttttggaaattttgaaagaggtactaccatgatgaacagaaataaagttgctatctatgtacgtgttagcacacaggggcaagttgat

SEQ ID NO: 37819 - DNA, 260 bp, Unknown
  Description of Unknown: RightRegion for integrase A387 sequence
tggaataaaaaagaacagctttattggggcactgcttccattgtatttttagtgctttttataatctaaacacaataataaaaagcctcacgctcaactttggtcgatgcgagcgtgaggcgaacgtgtatagtaaaaacctgctttgcagtaggtctctttactatacccattttaacataaaaatgaggtgaaaaacaatgattacaacaagaaaagtcgctatttatgttagagtcagtacaacaaatcaggcagag

SEQ ID NO: 37820 - DNA, 260 bp, Unknown
  Description of Unknown: RightRegion for integrase A388 sequence
atgtcctccatgactgctgatgaccacgtcaccatcgagtggcgggacgtgagcgagtagcggatacgacgaagccccggctaccccctttcgggggtgccggggccttgtctcagttgtggtggccgcactccatccgctcgatgacggcgagggcgtcctcgtacctgcttgcctcctgcatcaggaggaggcgaaggtcggcgagcttggcctgtacccacttggggagtcgggcctccctctccgagctcatcagc

SEQ ID NO: 37821 - DNA, 260 bp, Unknown
  Description of Unknown: RightRegion for integrase A389 sequence
ggcgtgcaggaggtgttccacccgggctgatcagatgatccatcgggaacctactcgtttgaggagttccatgcaggtgccctcgggcccgcctccgggcgggctcgggggtgcttttttttgtgcctgacatatgcacatattcgcatatgtcttcgtatcggaccccgtgtcaaatgcggcgactatgacaactcacggtgtaccctttcgacatgcgagtcctaggccgaatccggctctcccgaatcaccgaagaa

SEQ ID NO: 37822 - DNA, 260 bp, Unknown
  Description of Unknown: RightRegion for integrase A390 sequence
ctgacctccatgtctgtcgatgatcacgtcaccatcgagtggcgggacgtgagcgagtaaccgctacccccgaacgggggtaggtacgacgaagccccggctacccccattcgggggtgccggggccttgcgttgcacgtcagttgtggtggccgctctccaggcggtcgatctcttcgagagacgcctcgtagttgccggcctcctggaggaggagcaggcggaggtcggcgaacttggcctgcgcccaggcggggagc

SEQ ID NO: 37823 - DNA, 260 bp, Unknown
  Description of Unknown: RightRegion for integrase A391 sequence
ctgaccagcatgaccacggacgaccacgtcagcatcgaatggcgtgacgtcgaggagtaagcaggtacgacagagccccggctaccccctttcgggggtgccggggccttgtcttgtctcactccccccgaacgggggtggtgtcagttgtggtggccgctctccatctgctcgatgacttcgagggcgtcctcgtacttgctcgcctcctgcatcaggaggaggcggaggtcggcgagcttggcctgtgcccacttcgg

SEQ ID NO: 37824 - DNA, 260 bp, Unknown
  Description of Unknown: RightRegion for integrase A392 sequence
aggcaaatacctttgcggttgagctccttcttcccgattgggtagtaagccaatataaaaatactgaattcacccttgatgatatagctgtcatgaatggggttcctgcagagttagcccacctaaaagacctatcagagctaaaaaatttttagcccgaaaacagaacatatgtttccaaaaagggaggatagattatcatgaacttgatggatgaaaacactccaaagaatgtcgggatatacgttagggtttcaaca

SEQ ID NO: 37825 - DNA, 260 bp, Unknown
  Description of Unknown: RightRegion for integrase A393 sequence
cgtaaatggttatgatgcaactttaaaaagagtatttaaacatcaggatggtgtaactctagaacctcttagttacaatcctgaccaccaaacacaattttatagtgataaagacatggaccattaccctgtatcaattaaaggtaaattagtctggtatatggcaccacttaatattaaattctaggaggattttacctatgaagtgtgtagcctatattagggtatctacagatgaacaagctaaacatggttattcc

SEQ ID NO: 37826 - DNA, 260 bp, Unknown
  Description of Unknown: RightRegion for integrase A394 sequence
atgacctccatgtctgtcgatgatcacgtcacgatcgagtggcgggacgtcgaggagtagcaggtacgacgaagccccggctacccccattcgggggtgccggggccttgtcttgtctcgctacccccgaacgggggtggtgtcagttgtggtggccgctctccaggcggtcgatctcgttcagggcgtcctcgcaccggccggcctcctgcatcaggaggaggcggaggtcggcgagcttggcccgtgcccacttcggg

SEQ ID NO: 37827 - DNA, 260 bp, Unknown
  Description of Unknown: RightRegion for integrase A395 sequence
ctgaccagcatgaccgtggacgaccacgtcacgatcgaatggcgtgacgtcgaggagtaagcgggtacgacgaagccccggctacccccattcgggggtgccggggccttgtcttgtcttgctacccccgaacgggggtggtgtcagttgtggtggccgctctccaggcgctcgacctgcttcagtgcgtcctcgtaccgggccgcctcctgcatcaggagcaggcggaagtcgccgagcttgtcctgtgcccaccgagg

SEQ ID NO: 37828 - DNA, 260 bp, Unknown
  Description of Unknown: RightRegion for integrase A396 sequence
ctgacctccatgtctgtcgatgatcacgtcacgatcgagtggcgggacgtgagcgagtaaccgctacccccgaacgggggtaggtacgacgaagccccggctacccccattcgggggtaccggggccttgcgttgcacgtcagttgtggtggccgctctccaggcggtcgatctcttcgagagacgcctcgtagttgccggcctcctggaggaggagcaggcggaggtcggcgaacttgatctgggcccagacggggagc

SEQ ID NO: 37829 - DNA, 260 bp, Unknown; identical to SEQ ID NO: 37390
  Description of Unknown: RightRegion for integrase A397 sequence

SEQ ID NO: 37830 - DNA, 260 bp, Unknown
  Description of Unknown: RightRegion for integrase A398 sequence
accataagcactgctagcggtggtagttctggttttggtggtggtgaccgtatccaagcgactatggtatttgagaaaatttaaaaaagccccacgctcagaagtttgcagacagagagcgtgaggctagtggtaagaaaaaaagcattaaaaagctctttttcttatacccattttatcaagaaatgaggtaaaaatcaatgcgaaataaagtagcaatctacgtcagggtttcaaccgcttcacaagctgatgaaggt

SEQ ID NO: 37831 - DNA, 260 bp, Unknown
  Description of Unknown: RightRegion for integrase A399 sequence
cactggaacgacgaccgcgtcgagctcgtcgactacatggccgggcagctcgacgactagctcctcccccgtaccccctcctgggacgccggggatgccgctgcctacgtcgcaccccctagctatccatagaagaagaccgcctccgcccgtctagcgccggtgaggtgaccataacgaaacaacaacgaacgtcttacgggtgacgtagaatcgagacaacttcgctcacgagtgacgatatgacggttattccgtca

SEQ ID NO: 37832 - DNA, 260 bp, Unknown
  Description of Unknown: RightRegion for integrase A400 sequence
gcccgcaaggtggtgacccccgaggctgagcgagtagtcctggccgaccgagccgcctgacaacgcaagaagcccccgtcctcgaaggttgaggcgggggcttctgtcatgcagcgatcttgacggggccgagcagcgtcttcacggctcggagctggtcgtcggtcagaggtaacggcggcgagagcttgcggcgctcagccacgatggctcgggcctcctcgcgggtcacggggcgacccgtccgttcgcctggaacg

SEQ ID NO: 37833 - DNA, 260 bp, Unknown
  Description of Unknown: RightRegion for integrase A401 sequence
ctgtcgagcatgaccgtggacgaccacgtcaccatcgagtggcgagacgtggccgagtgacgaccacccccgaatgggggtaggtacgacaaagccccggctacccccattcgggggtaccggggccttcgtgtgtcagttgtggtggccgctctccaggcggtcaatctcttcgaggctcgcctcgtagttgccggcctcctggaggaggagcaggcgaagatcggcgagcttgacctgcgcccacacggggagtttct

SEQ ID NO: 37834 - DNA, 260 bp, Unknown; identical to SEQ ID NO: 37393
  Description of Unknown: RightRegion for integrase A402 sequence

SEQ ID NO: 37835 - DNA, 260 bp, Unknown
  Description of Unknown: RightRegion for integrase A403 sequence
cgcgcgccccagcgcgggaagtggtcgccggagcgcgtccgcgtcgccttccacggctgacggagcgccggaggagcgccggaggcgccgtgtaaacgccctccaagtgagcgaatagtgaagaaagtgagctaagttccttcccttgtattccattgcataggagagactctcttacagctagaacacaagggaaggaacttgcttcacttccttcactaaaactcactttcgcccttcgtgagcaacctcccccaccg

SEQ ID NO: 37836 - DNA, 260 bp, Unknown
  Description of Unknown: RightRegion for integrase A404 sequence
gtaaaggaatagagtatattttctactctaatggattaacagtcccagaaaatacaataaatataaaaaaagcaaattaaaaaagacctacacagcgccggcaagcaaacgtgtaggtcaagttggcaatagtaaaaaccttacttttcgtaggtctttttactattgccattttaacataaaagcgaggtataaatcaaatggcaaaagtagctatatacgctagagtatcaacgttaaaccaagcagatgaaggatac

SEQ ID NO: 37837 - DNA, 260 bp, Unknown
  Description of Unknown: RightRegion for integrase A405 sequence
gaggacaaggctagaatagcaatggttcttgagcagcacctcaagaataaaaagaaataaaaaagccctacgctctcaaagtttggcgactccgagcgtagagcgataatacaagaaagattttcaaaagatactatttttgaactcttttcttgtacctattttatcatttttttataaattttgaaagaggtactactatgattgcaacgaataaagtagctatttacgtgcgggtttcaaccatttctcaggcggaa

SEQ ID NO: 37838 - DNA, 260 bp, Unknown
  Description of Unknown: RightRegion for integrase A406 sequence
ggatggcggaggttttacaaaatcagaagccaactacgctattaaacatttagaagacgaagattaaaataaacaaaaaagcccacgctcaaattttggacgaggagagcgtgagctaataattggtagtatagtaaaaagcctacttttagtagggctctttactatacccattttaacaagaaatgaggtataaatcaatgcaaacaaaacgaaaagtagctatatacagtcgtgtttctacactacaccaagccgag

SEQ ID NO: 37839 - DNA, 260 bp, Unknown
  Description of Unknown: RightRegion for integrase A407 sequence
aggttttacaaaatcagaagccaactacgctattaaacatttagaagacgaagattaaaataaacaaaaaagcccacgctcaaattttggacgaggagagcgtgagctaatatgtatgtataagaaaaacaggcattaaaaagccctttttcttgtactcattttaacatttttttacaaaatttgaaagagggtacaatatgaacacaaaacgaaaagtagctatatatagtcgtgtttctacactacaccaagccgag

SEQ ID NO: 37840 - DNA, 260 bp, Unknown
  Description of Unknown: RightRegion for integrase A408 sequence
cgcagcaatcaaagcaattccaccttttcttatgtactttatcgagaacacttgtatatacagaatgaatgttctgaatttataactttaattatataataaatcattctcagaaaattgctagtactttcgacatattacgacaaaacttttataaaaaacatttagatttaatatatctttaattggagaggtttaaaatgaaagttgttctttacgtaagggttagtacgcaagaacaagttgaagaaggatatagc

SEQ ID NO: 37841 - DNA, 260 bp, Unknown
  Description of Unknown: RightRegion for integrase A409 sequence
cggtgggagctgggcgtcgaggtgtacccgctgcgcatggccccgcacgctgatgcgtaacacgcgctagcgtgtgcgccacaactgaatatcgacaactgaatatggggttccgctatgacagggcagcagctcgacgcgtgggttgcgcagcaggtggcgcgtttcaagccaggtgacttggacgccggcattgaggtgatgaagcgtgctgcgcgccggcaaggtggcaccgaagagaagcaacccgccgcgtagcg

SEQ ID NO: 37842 - DNA, 260 bp, Unknown
  Description of Unknown: RightRegion for integrase A410 sequence
ggaacagttatgggatttttaggagaaaaagggaagaagcaatggcactgcaacaagtgcagctgtatatttgagacaaaataaaaaagccccacgctcaaatttggcgaggagagcgtgaggcgaatctagtataagaaacaaccattaaataggtcgttttcttatacccattttaacaaaaaatgaggtgaaaaacaatgaggaaagtagctatttactctagagtatcaacaataaatcaagccgaagaaggatat

SEQ ID NO: 37843 - DNA, 260 bp, Unknown
  Description of Unknown: RightRegion for integrase A411 sequence
atacaacaaataggttgcattatcatgcttattcctatagtgtacattttgttccagcttatttcggcgtttaactaaaaaaaccccacgctctcaaagtttggcgactctgagcgtgaggcgaatctagtatagtaaaaacctgctttaagtaggtctctttactgtactcattttaacaaaaaatgaggtaaaaaacaatgagaaaagtagctatttactctagagtatcaacaataaatcaagccgaagaaggatat

SEQ ID NO: 37844 - DNA, 260 bp, Unknown
  Description of Unknown: RightRegion for integrase A412 sequence
ggaacagttatgggatttttaggagaaaaagggaaaaagcaatggcactgcaacaagtgcagctgtatatttgagacaaaataaaaaagccccacgctcaaatttggcgaggagagcgtgaggcgaatctagtataagaaacaagcattaaatggctcgttttcttgtacccattttaacaaaaaatgaggtgaaaaacaatgaggaaagtagctatttactctagagtatcaacaataaatcaagccgaagaaggatat

SEQ ID NO: 37845 - DNA, 260 bp, Unknown
  Description of Unknown: RightRegion for integrase A413 sequence
cagttatgggatttttaggagaaaaagggaagaagcaatggcactgtaacgagtgcagctgtatatttgagacaaaataaaaaaagccccccgctcaactttggtcggtgcgagcgtgaggcgaatctagtatagtaaaaacctgctttaagtaggtctctttactgtactcattttaacaaaaaatgaggtaaaaaacaatgagaaaagtagctatttactctagagtatcaacaataaatcaagccgaagaaggatat

SEQ ID NO: 37846 - DNA, 260 bp, Unknown
  Description of Unknown: RightRegion for integrase A414 sequence
gcgtcgagcatgaccgtggacgaccacgtcaccatcgagtggcgagacgtggccgagtagcagatacgacgaagccccggctacccccttctgagggtgccggggctttcgtgtgtcagttgtggtggccgctctccaggcggtcgatctcttcgagggacgcctcgtagttgccggcctcttggaggaggagcaggcggaggtcggcgagcttgacctgcgcccacacggggagcttcttctcgcgctcactgctgaag

SEQ ID NO: 37847 - DNA, 260 bp, Unknown
  Description of Unknown: RightRegion for integrase A415 sequence
cccgaggactgccaggtcgagtgggtggacgagcgtccgcgcctgtcggctgtgtcctgaacgcagagaagccccctacctgcgagaggtagggggctgtctcatgccgcgcgtcgggagggggctgcctcggcgatgccgaggagctgtcggaggtggacgacctgctcgtccgagagtgggggcggagggttctggcgtagctcctcgcgggctacctgccgaagctcctctcgggtcacggcgctacccgcccggcc

SEQ ID NO: 37848 - DNA, 260 bp, Unknown
  Description of Unknown: RightRegion for integrase A416 sequence
tcgaaggcgcgcaaggtcgtgaccccagagcatgagcgcgtggtcctggcagaccgctgacacaacgcaagaagccccctacctcggagtcgtgaggtagggggcttcgtcatgcagcgagacggacgggcttgcgtcggagctggaccggaccgagtagcaccttgacggtgcggagctggtcgtcggtcaggggtaacggtggggtgagctgtcgccgactggcgacgatggctcgggcctgctctcgggtcacgggg

SEQ ID NO: 37849 - DNA, 260 bp, Unknown
  Description of Unknown: RightRegion for integrase A417 sequence
tcgaaggcgcgcaaggtcgtgactccggagcatgagcgcgtgatcctggcagaccgctgacacaacgcaagaagccccctacctcggagtcgtgaggtagggggcttcgtcatgcagcgagacggacgggcttgcgtcggagctggaccggaccgagtagcaccttgacggtgcggagctggtcgccggtcaggggtaacggtggggtgagctgtcgccgactggcgacgatggctcgggcctgctctcgggtcacgggg

SEQ ID NO: 37850 - DNA, 260 bp, Unknown
  Description of Unknown: RightRegion for integrase A418 sequence
ggggagctggaggacatggccctggagctggagtccgtggtggcggacgcgatggagtgacacggcacacatgaaggagggtcggcccccgccaagggaccggccctcctttgcgttgcgtcacggccggctgagcggagagtgacggaacggggtcccagggggcggaaaaagtgccctgggacccttctttcttacgtacgtctttagagaagaacaggcccagggcacttttcttgccccctgtccctggcgggccc

SEQ ID NO: 37851 - DNA, 260 bp, Unknown
  Description of Unknown: RightRegion for integrase A419 sequence
gttgggaagggtcgccggaatgtgccgatcggtgagggcatcgggctgacgtggctgtgagtcagcggcgccgcgcgcgtacacgccgcaaccggttcacgaggaccggcgcgtgcgcgagtgcttcggggtcctcgagcaaattgttgacgcgttgccagaaccgtgtgacggagatgccgaattcagcgtggacggcgtcggcctggttgccggcgtagttccatcggtgggcggcgaagtcgagcaatgcgcgatcg

SEQ ID NO: 37852 - DNA, 260 bp, Unknown
  Description of Unknown: RightRegion for integrase A420 sequence
gggcgctggacgccggaccggatccaggcgcgggtcgccggacaagatctgcccgtgtagtgacgaagtgacgtatttacgtaccttctacattcttttctcgagagagagagttctcgagggaagaatgtagaaggtacgtatttcggtaacttgtgtcactcaggccgcccccggaactatttccgacggatcctgagcacctgccacggcctggccatcttcttagtcgtcaccccgtaccgacgattaggaggccc

SEQ ID NO: 37853 - DNA, 260 bp, Unknown
  Description of Unknown: RightRegion for integrase A421 sequence
gtatttgaaaaaatcaagtaaaataaaaaggccccacgctcaactttggtcggtgcgagcgtgaggcgaatctagtacaagaaatcaggcattaaaaagccctttttcttgtacccattttatcattttttaggaaataagaaaagaggtacagcatggctgaaaaaagaaaagtagccatatattgcagggtttcatccatgcaccaggcaatagaaggttattcaatcgaacaacaacgagacagtttgacaaaatac

SEQ ID NO: 37854 - DNA, 260 bp, Unknown
  Description of Unknown: RightRegion for integrase A422 sequence
gccaagggcatgagcttcgaggaccagatcgtcgtggaacctcggtacgtggccgcgtagctgcccggaacgcaagaagccccgtcctccagaaggaggcggggctgtcttgtgtcaggcgacgtgtcggcgaggcggttggagctctccgaacagggtccgcacgatgcgggcctgctctccggtcggcggaggcggcgggttgtcagcccagtgccgctcccaccttgcgatgcggtcggacagggtcacggtgccac

SEQ ID NO: 37855 - DNA, 260 bp, Unknown
  Description of Unknown: RightRegion for integrase A423 sequence
gataatgagaacggtaaggtaaatacgcttgatataagggagattacttttaaattttaatagtagtagtgttacagggtaggtagtgcttgtaacactatttttatgtataaaaaaagaccgcaccatttaaggtacggtttatgtataggttgagactacaccttactttaggcagctttagagacattatatgttcttctcttatccacgccgtcccccgacgtactacctacacccgattggtaatgccaatcact

SEQ ID NO: 37856 - DNA, 260 bp, Unknown
  Description of Unknown: RightRegion for integrase A424 sequence
cggtgggagcttggcgtcgaagcgtatccgctgcgcatggcctcacgcattgatgcgtaacgcgcgctaacgtgtgcgctcacaactgaatatcgacaactgaatatggggtaccgctatgacggggcagcagcttgacgcatgggttgcgcagcaggtggcgcgtttcaagccgggcgatttggacgccggcattgaggtgatgaagcgcgctgcgcggcgccgcatgggggatcaacggaagcggcccgccgcgtaac

SEQ ID NO: 37857 - DNA, 260 bp, Unknown; identical to SEQ ID NO: 37841
  Description of Unknown: RightRegion for integrase A425 sequence

SEQ ID NO: 37858 - DNA, 260 bp, Unknown
  Description of Unknown: RightRegion for integrase A426 sequence
cggtgggagctgggcgtcgaggtgtacccgctgcgcatggccccgcacgctgatgcgtaacacgcgctagcgtgtgcgccacaactgaatatcgacaactgaatatggggttccgctatgacagggcagcggctcgacgcgtgggttgcgcagcaggtggcgcgtttcaagccaggtgacttggacgccggcattgaggtgatgaagcgtgctgcgcgccggcaaggtggcaccgaagggaagcaacccgccgcgtagcg

SEQ ID NO: 37859 - DNA, 260 bp, Unknown
  Description of Unknown: RightRegion for integrase A427 sequence
cggtgggagctgggcgtcgaggtgtacccgctgcgcatggccccgcacacagatgcgtaacacgcgctagcgtgtgcgccacaactgaatatcgacaactgaatatggggttccgctatgacagggcagcagctcgacgcgtgggttgcgcagcaggtggcgcgtttcaagccaggtgacttggacgccggcattgaggtgatgaagcgtgctgcgcgccggcaaggtggcaccgaagagaagcaacccgccgcgtagcg

SEQ ID NO: 37860 - DNA, 260 bp, Unknown
  Description of Unknown: RightRegion for integrase A428 sequence
cggtgggagctgggcgtcgaggtgtacccgctgcgcatggccccgcacacagatgcgtaacacgcgctagcgtgtgcgccacaactgaatatcgacaactgaatatggggttccgctatgacatggcagcagctcgacgcgtgggttgcgcagcaggtggcgcgtttcaagccaggtgacttggacgccggcattgaggtgatgaagcgtgctgcgcgccggcaaggtggcaccgaagagaagcaacccgccgcgtagcg

SEQ ID NO: 37861 - DNA, 260 bp, Unknown
  Description of Unknown: RightRegion for integrase A429 sequence
cggtgggagctgggcgtcgaggtgtacccgctgcgcatggccccgcacgctgatgcgtaacacgcgctagcgtgtgcgccacaactgaatatcgacaactgaatatggggttccgctatgacagggcagcggctcgacgcgtgggttgcgcagcaggtggcgcgtttcaagccaggtgacttggacgccggcattgaggtgatgaagcgtgctgcgcgccggcaaggtggcaccgaagagaagcaacccgccgcgtagcg

SEQ ID NO: 37862 - DNA, 260 bp, Unknown
  Description of Unknown: RightRegion for integrase A430 sequence
cggtgggagcttggtgtcgaagtgtatccgctgcgcatggcctcacgtattgatgcgtaacgcgcgctaacgtgtgcgctcacaactgaatatcgacaactgaatatggggtaccgctgtgacgggacagcagcttgacgcatgggttgcgcaacaggtggcgcgtttcaagccgggcgatttggacgctggcattgaggtgatgaagcgcgctgcacggcgtcgcatggggggtcaacggaagcggcccgccgcgtaac

SEQ ID NO: 37863 - DNA, 260 bp, Unknown
  Description of Unknown: RightRegion for integrase A431 sequence
gtcgggaagggccgccggaacgtgcccatcggtgagggcatcgggctcacctggctgtgagtcagcggcgccgcgcgcgtacacgccgcagccggttcacaaggaccggcgcgtgcgcgagcgcttcggggtcgtcgagcaggttgttgacgcgctgccagaaccgggtgatcgagatcccgaactcggtgcggaccgcgtcggcctggttgccagcgtagttccagcggtgggcggcgaagtcgagtagcgcgcggtcg

SEQ ID NO: 37864 - DNA, 260 bp, Unknown; identical to SEQ ID NO: 25639
  Description of Unknown: RightRegion for integrase A432 sequence

SEQ ID NO: 37865 - DNA, 260 bp, Unknown
  Description of Unknown: RightRegion for integrase A433 sequence
cacgtgtagattcgttaaaatactttattataggctcagtagttacattgcttattggtattgcaggtatagtttacgcaaactggcaggtaattagttcaatgttgcaattggcaaataataaataacatatagccctatacaagggcttttctttagacaaataaatcgaacatatattctgtttagggggaatccgaatggcagtaggtatttacattcgtgtttcgacagaggaacaggcaaaagaagggtactcc

SEQ ID NO: 37866 - DNA, 260 bp, Unknown
  Description of Unknown: RightRegion for integrase A434 sequence
tgtccggatggtcatggcccgtgagcgcgtgaccgcgaaggccctcgccgccgcgactggaatctcccgaagctacatgggcaagcgactgcgggacgaagcacccttctccctgaacgacgttgaggccatcagcaaggtgctcggcatcgaactgccagagctctagtcctcccccacgaaatgaacggaaagaagtaatgcgcgcagtcctctacctgcggcagtccgtagcccgagaggactccatcagcctggag

SEQ ID NO: 37867 - DNA, 260 bp, Unknown
  Description of Unknown: RightRegion for integrase A435 sequence
ccgcagaagctgcaacgcgagcaagacaagccgccgatcgaagtcctttggcgcacatagcaaaagcccctgcctggcgtgaatgccggacgggggctttgcttttcgagctagacgacggctgagagcgtgatctcgtaggcgagcctgttcagcgcagtgaggtcgtccagcaggtccttcgggtcgtcggtctgtgctgcgctggcgagcaggcccgtgctgaggttcacgagctggcgaaagttgatcgcggtcga

SEQ ID NO: 37868 - DNA, 243 bp, Unknown
  Description of Unknown: RightRegion for integrase A436 sequence
gaaaaaagactatgcgatgaactaaatatcgaatatataaatttaaaccttcgcactggacctagctatatatttaccgaagaagaatatcaggagttgaaatccgactacgccaaattgtttttacagttagaaaatattgatgaaaacaactagtatttattttgaaaggagcaattttatatgaaacgtgcagcattgtatatacgtgtatccacaatggaacaagccaaggaaggatac

SEQ ID NO: 37869 - DNA, 260 bp, Unknown; identical to SEQ ID NO: 25617
  Description of Unknown: RightRegion for integrase A437 sequence

SEQ ID NO: 37870 - DNA, 260 bp, Unknown
  Description of Unknown: RightRegion for integrase A438 sequence
aagaaatggaaaataatccggacaaaaaccaacatgctggaggtggtccaggaatgtcgttaacacaccctaatcaatcatatgatagttttagaaaagaagtaggaaaagcaagaagtgaagcaatagttgttcaacaataaaatttcgggtagctcgcctacccttattattttttgccaattttgaggagggaacacatgaaagtagcaatttacactagagtttcaagtgctgaacaggcaaatgaagggtattct

SEQ ID NO: 37871 - DNA, 260 bp, Unknown
  Description of Unknown: RightRegion for integrase A439 sequence
gtcgggaagggccgccgaaacgtccccatcggtgaaggtatcggcctcacctggctgtaactcagcggcgccgagaccgcagacgccgcaaccgattcaccaccactggtgcgtgcgcgagcgcgtcggggtcgtccagcaggttgttgacgcgctgccagaaccgggtgaccgtcatgccgaactcggtgcggaccgcctcagcctggttgccggcgtagttccagcggtgggcggcgaagtcgagcaacgcccggtcg

SEQ ID NO: 37872 - DNA, 260 bp, Unknown; identical to SEQ ID NO: 37341
  Description of Unknown: RightRegion for integrase A440 sequence

SEQ ID NO: 37873 - DNA, 260 bp, Unknown
  Description of Unknown: RightRegion for integrase A441 sequence
cgcaagttcgacacgcagaccgtcgtgtttaggccgcgcaacccggcggtgcagatgtagcctgctgatgctcgaccacaactgaatacgacaactgaataggttcgacatgcaacaactcgccgatttcgaggcgcagtatggcgccgacatggacgccgccgcggcacaattccctccaatgaccgatgcgcagcgggcgcgggtcgccacggttctgcgcggcaactcgacccggcacgcggcggcagcctagagcg

SEQ ID NO: 37874 - DNA, 260 bp, Unknown
  Description of Unknown: RightRegion for integrase A442 sequence
gtcgggaagggccgccgaaacgtccccatcggtgaaggtatcggcctcacctggctgtgactcagtggcgccgcgaccgcagccgccgcaaccgattcacgaccaccggtgcgtgctcaagcgccgccgggtcgtcgagcaggttgttgacacgctgccagaaccgggtgaccgagatgccgaactcagcttggactgcgtcggcctggttgccggcgtagttccagcggtgggcggcgaagtcgagtagcgcgcggtcg

SEQ ID NO: 37875 - DNA, 260 bp, Unknown
  Description of Unknown: RightRegion for integrase A443 sequence
gttgggaagggccgccggaatgtgccgatcggtgagggcatcggcctcacctggctgtgagtcagcggcgccgagaccgcagccgccgcaaccgattcacgagcgtcggggcgtacgcaagcgcctccgggtcgtccagcagattgttgacgcgctgccagaaccgggtgaccgtcatgtcgaactcagtgcggaccgcctccgcctggttgccggcgtagttccaccggtgggcggcgaagtcgagcaacgcgcggtcg

SEQ ID NO: 37876 - DNA, 260 bp, Unknown
  Description of Unknown: RightRegion for integrase A444 sequence
agtatcaaaattgataaaaaagacggagttacagaagtattagatatagaattttattagtgtttatgttacatttacacatgtaaagttcacgtatatacaaaaaaatcgacaaaacaaaagagcacagcgtgtataagtagtgttggtagcactcttataccgtccacctgattgcgccaggtaaacacttgccatactctcatgagttattttacatcatgcagggtctattaagcaacgtttaccaaattattggt

SEQ ID NO: 37877 - DNA, 260 bp, Unknown
  Description of Unknown: RightRegion for integrase A445 sequence
gatatttagaccagattcatatgataatcgtttcttcgattacacagtttcttatgaagagtctattaatataaaaattcacggtaaagtagtaatttacatagttgcattagactaacaactagatgaattaaatatttagcgctaaatatttaatggacagccttgctagctgtcctctttttaaaaggaggattattatgaccgttggaatttatattcgtgtttctactgaagaacaagtccgagatggattttct

SEQ ID NO: 37878 - DNA, 260 bp, Unknown
  Description of Unknown: RightRegion for integrase A446 sequence
gtcgggaagggccgccggaacgtgccgatcggtgagggcatcggcctcacctggctgtagctcagcggcgccgagaccgcagacggcgcagccgattcacgagagtcggggcgtgcgcgagcgcttccgggtcgtccagcacgttgttgactcgctgccagaaccgggtgaccgagatcccgaactcgttgcggaccgcctcggcctgattgccggcgtagttccatcggtgcgcggcgaagtcgagcaacgcccggtca

SEQ ID NO: 37879 - DNA, 260 bp, Unknown
  Description of Unknown: RightRegion for integrase A447 sequence
gtcgggaagggccgccggaacgtgccgatcggtgagggcatcggcctcacctggctgtgattcagcggcgccgagaccgtagacgccgcaaccgattcaccagggtcggggcgtgcgcgagcgcgtcggggtcgtccagcaggttgttgacgcgctgccagaatcgggtaaccgagatcccgaactcgttgcggaccgcctcggcctggttgccggcgtagttccatcggtgggcggcgaagtcgagcagagcccggtcg

SEQ ID NO: 37880 - DNA, 260 bp, Unknown
  Description of Unknown: RightRegion for integrase A448 sequence
gtcgggaagggccggcggaacgtgcccatcggtgagggcatcggcctcacctggctgtaactcagcggcgccgagaccgcaggcgccgcaaccggttcacgagcatcggtgcgtgtgcgatcgcctccgggtcgtcgagcaggttgttgacgcgctgccagtaccgggtgaccgtcatgtcgaactcggtgcggaccgcttcggcctgattgccggcgtagttccagcggtgggcggcgaagtcgagcaacgcccggtcg

SEQ ID NO: 37881 - DNA, 260 bp, Unknown
  Description of Unknown: RightRegion for integrase A449 sequence
gtcggcaagggacggcggaacgtccccatcggtgagggcatcggactcacctggctgtgactcagcggcgccgagaccgcagccgacgcaaccggttcacgaccaccggggagtgctcgagcgccgccgggtcgtcgagcagattgttgacgcgctgccaaaaccgggtgacggagatcccgaactcggcgtggaccgcggcggcgtggttacccgcgaagtgccaccggtgcgcggcgaactcgagcaacgcccggtct

SEQ ID NO: 37882 - DNA, 260 bp, Unknown; identical to SEQ ID NO: 37417
  Description of Unknown: RightRegion for integrase A450 sequence

SEQ ID NO: 37883 - DNA, 260 bp, Unknown
  Description of Unknown: RightRegion for integrase A451 sequence
atttcagaagatgggcagataagtgtaaaattcttagaggggacagaggtagacttgtaagtgactgtgactgaaaggttgcagtttttttcgtttttagtggtataatagccgtataaatcataattgatggtgaattacatggaaaataatttgaatttcgatatttacgagcatcactttggagcattatattatcacataaaatctttgattggggaatcccctatctatgatgaaactattgatgaggaagattt

SEQ ID NO: 37884 - DNA, 260 bp, Unknown
  Description of Unknown: RightRegion for integrase A452 sequence
caggtgggtgtcggtcgtcgcgggttgatcggcgaaggcgtggaattcacctggctctagaccggatccgtcggagccggttcaccgcgaccgggttgtgcgcgagcgcttcctcggtgtcgagtatccggttgaccttctgccagaagcgggtgaccgagatcccgaactcggcgcggatcccgtcggcctggtttcccgcgtagttccaccgtcgggcggcgaagtcgagcaatgctcggtcatcgtcggtcacgcga

SEQ ID NO: 37885 - DNA, 260 bp, Unknown
  Description of Unknown: RightRegion for integrase A453 sequence
caggtggggatcggtcgtcgcgggttgatcggcgaaggcgtggaattcacctggctctagaccggagccgacgtagccggttcaccgcgaccggattgtgcgcgagcgcttcctctgtgtcgagtatccggttgaccttctgccagaagcgggtgaccgagatcccgaactcggcacggatcccgtcggcctggtttcccgcgtagttccaccgttgggcggcgaagtcgagcaatgctcggtcgtcgtcggtcacgcga

SEQ ID NO: 37886 - DNA, 260 bp, Unknown
  Description of Unknown: RightRegion for integrase A454 sequence
atctcagaagatgagcagataagcgtaaatttcttagaggggactgaggtagacttgtaagtgactgtgaccgaaaggttgcagtctttttgtaaatttagtggtataatattccttgaaggcgcttttcaataaaatttgagtgataacaagaaaactttgtgcagatgacttaccagaagaagtaatttcttgtaaggttctgtctagtcgacatggagaagaaaagaaagatgaatttaacaacagaaagattgacc

SEQ ID NO: 37887 - DNA, 260 bp, Unknown
  Description of Unknown: RightRegion for integrase A455 sequence
tgttcatcgtcataaatatcaaattcactactataattttcaactgattcttttatataagctatttctgcgtcagtaaattttacacacatttcatcacctactttttattttattatatcacatttagtacctagtactaaaatcacgggtagcccgcctacccttattattttttgccaattttgaggagggagcacatgaaagtagcaatttatactagagtgagtacacttgaacaaaaagaaaaaggacactct

SEQ ID NO: 37888 - DNA, 260 bp, Unknown
  Description of Unknown: RightRegion for integrase A456 sequence
tgaactacactctctttgatggtatattacatatatacaaaacaagccgctgaaatatttgcggcaagcttcaaattagacaagtcgctgaaatatttgcgacatgagagggtgcatctgcgctctctctttttttatacaattttcacgggtagcccgcctacccttattattttttgccaattttgaggagggagcacatgaaagtagcaatttatactagagtgagtacacttgaacaaaaagaaaaaggacactct

SEQ ID NO: 37889 - DNA, 260 bp, Unknown
  Description of Unknown: RightRegion for integrase A457 sequence
ctaccttctaaagtttcaatataggtagttctatctgctttttctgcattaactataactggtttttttctaacctttactttaggagacatattatcacctacttttttattttattatatcacatttaatactaaggactaaatcacgggtagcccgcctacccttattattttttgccaattttgaggagggagcacatgaaagtagcaatttataccagagtaagtacacttgaacaaaaagaaaaaggacactct

SEQ ID NO: 37890 - DNA, 260 bp, Unknown
  Description of Unknown: RightRegion for integrase A458 sequence
gaataaggtgttactataacaatatattagggaaatatccctaaacctttttgatattcgctattcttatttgaatagtaaacttgaaatcttataaatataagtggcacctattttatataggtgtctttttttatgtgataaattcttgggtaattcgtctacccttatattttttacttttttaaggaagtgagaacatgaatgtagcaatttattgtcgtgtcagtacactagagcaaaaagaacatggctattct

SEQ ID NO: 37891 - DNA, 260 bp, Unknown
  Description of Unknown: RightRegion for integrase A459 sequence
tacagtaaaacgtgtaagacgtactgaaacaaaattacatttagatccagtaagttattcagatgaatttaaaacaaatacttttgatttagaaagcttagaagaaatagaagtaatcggaaaagtaatttataactaccaaatatttgagtaagggtactacattttgtggcacccttttcttttaaaggagtgataacttgaacgtagcaatatattgtcgtgtcagcacattagagcaaaaagaacatggctattct

SEQ ID NO: 37892 - DNA, 260 bp, Unknown
  Description of Unknown: RightRegion for integrase A460 sequence
gcgctcgtacaccgtcaatcagttgtagaaaatggagacatggccttgatcgccgtaaataatgaaatattgatcagacgcgtttataaagataagaatgaaattacgcttgatgcattattgagaaaacaaactattgatgaaagagaaactttattctctgttatcggaaaagtaacaaaggttataggtgaatactaatgaagtgtgcaatatatagaagagtttctacagatgaacaagcggaaaaaggattctca

SEQ ID NO: 37893 - DNA, 260 bp, Unknown
  Description of Unknown: RightRegion for integrase A461 sequence
acattagttgataaagttataattgatggtaatcaaactcgtatttactggagattctaattttgttaatttgggagaaagaatattaatactttctcccaaaacaacaatcctcccggttcgtatttagataatcatactacattgtttatttcaagtaaaggcagtttagttttttattaaatataatagttacgttatctttggattatttacgcatattctaattcttaaaatagcaatttaaaggattacttaac

SEQ ID NO: 37894 - DNA, 260 bp, Unknown
  Description of Unknown: RightRegion for integrase A462 sequence
cgcccgcgcaagttcgacttcgcaccgggcaccgtgctgctgcgcgaatggggcgagcgcgagcatcgggtgacggtcaatgccgagggccatttcgagtacgagggccacaccttcaagagcttgacggcggtggctcggcacatcaccggccagcattggagcggcccgctgttcttcggtctgaaaggaggcgcctgatgacggaaatcgcctccactaaggcgcgcaaacgctgcgcggtctactgccgggtgtcg

SEQ ID NO: 37895 - DNA, 260 bp, Unknown
  Description of Unknown: RightRegion for integrase A463 sequence
aagaaatggaaaataatccggacaaaaaccaacatgctggaggtggtccaggaatgtcgttaacacaccctaatcaatcatatgatagttttagaaaagaagtaggaaaagcaagaagtgaagcaatagttgttcaacaataaaatttcgggtagtccgcctacccttattattttttgccaattttgaggagggagcacatgaaagtagcaatttatactagagtaagtacacttgaacaaaaagaaaaaggacactct

SEQ ID NO: 37896 - DNA, 260 bp, Unknown; identical to SEQ ID NO: 21221
  Description of Unknown: RightRegion for integrase A464 sequence

SEQ ID NO: 37897 - DNA, 260 bp, Unknown; identical to SEQ ID NO: 24408
  Description of Unknown: RightRegion for integrase A465 sequence

SEQ ID NO: 37898 - DNA, 260 bp, Unknown; identical to SEQ ID NO: 24408
  Description of Unknown: RightRegion for integrase A466 sequence

SEQ ID NO: 37899 - DNA, 260 bp, Unknown
  Description of Unknown: RightRegion for integrase A467 sequence
gaatatgtaaaacttaagaacaggcattccattgaaataaaagatatagaattttattaacatatgtacggaagtatagacacctgattaatatttaaggcgtatacttccgtaaaaaataacccacgcccataaagaacgtggtttagaacatagtatcaatttaaaattgggaacaaaaattattatacaataaaaaagagggtagacatagcgactacccttgtataatgacgtggtaattatattataacagatta

SEQ ID NO: 37900 - DNA, 260 bp, Unknown; identical to SEQ ID NO: 24902
  Description of Unknown: RightRegion for integrase A468 sequence

SEQ ID NO: 37901 - DNA, 260 bp, Unknown
  Description of Unknown: RightRegion for integrase A469 sequence
gagtatgtaaagtttaaaaacaggcattctatcaaaataaatgatatagaattttattaacatatgtacggaagtatagacactcgattaatatttaatgtgtatacttccgtatttttatttatagaacccgtcgaatttgatggatttagattatccgtgtcgaaatcgaggcggttaaaataaaaaagaccgcaccttttaaggtacggtttgaacgatttactcatttaaaacacaaataataaaactaaaattat

SEQ ID NO: 37902 - DNA, 260 bp, Unknown
  Description of Unknown: RightRegion for integrase A470 sequence
gaatatgtaaagcttaaaaataggcattctattaaaataaacgatatagaattttattaacttatgtacggaagtatagacactcgattaatatttaatgtgtatacttccatatatttttgtataaaacccgtcgaattcgacgggtttagattatccgtatcgaaatcgaggcggttgaaataaaaaaagaccacccagtgacatgtgtgggtagttaaaagtaaacggtgcagtcagcttcttactgctaaacgcaa

SEQ ID NO: 37903 - DNA, 260 bp, Unknown
  Description of Unknown: RightRegion for integrase A471 sequence
cgcggcccggggtttgacccgtcgagcgtgcggttcgtgtggggccgatctgcagattgacgctcggcatgcaccgatgcgcacgcgtcggcgggtgttttagggtgcccgcacggcggtgcgtcgaagtgtgcatcgcagcacaattgaatacatacaacagaatagagcccggcaaatgcgcacgatcagcgttgaagagtacgccgaacaggtcgccgcggcggcaccgccgttgacggacgcgcagcgtggacggc

SEQ ID NO: 37904 - DNA, 260 bp, Unknown
  Description of Unknown: RightRegion for integrase A472 sequence
ctcgaatgtttaatcgaaaagaacggtggtcaatttaactattctaatgtaattacacattataatttaaagatgggccaagaaatttacttaaaataaaaaataacgcaccctccggccaagaagatgtgcgttaaaaatagaaccaaaataggcttatttagttacgcctattttaccaaaaataatgaggtgaaacaatggcaaatgaaataaaacaagttgcgttatacatacgtgtgtctacagatcaacaagct

SEQ ID NO: 37905 - DNA, 260 bp, Unknown
  Description of Unknown: RightRegion for integrase A473 sequence
attgaggaagagttaatagaagaaatgaaggttattaatgaccaaaaatacaacatttaatatgttgtatcttaagctcaaaattgagcttaaaaataactcaattttaaaatttaaaaacaatactttaattacttaattaacaaaacaggtaataaatatgattgaacgcagtcttgctctattctttggtttaattgtaggtatcgtaggatacatatattcaaccaaaaagaaaactattaaagaaaattttttac

SEQ ID NO: 37906 - DNA, 260 bp, Unknown; identical to SEQ ID NO: 37892
  Description of Unknown: RightRegion for integrase A474 sequence

SEQ ID NO: 37907 - DNA, 260 bp, Unknown
  Description of Unknown: RightRegion for integrase A475 sequence
atggattcgatgcaactctaaaaagattttataagttccaagatggaattactttagaacctgaaagttataatcctgaatataaaacacaattttttgattctaaaacacaggaacacactcctgttgtagtaaaaggaaaattagtttggtatatggcaccacttaacgttaaattctaagtgtaagaggtgattattttgactaaggctgctatatatattcgtgttagtactcaagaccaagtagaaaattatagt

SEQ ID NO: 37908 - DNA, 260 bp, Unknown; identical to SEQ ID NO: 21696
  Description of Unknown: RightRegion for integrase A476 sequence

SEQ ID NO: 37909 - DNA, 260 bp, Unknown
  Description of Unknown: RightRegion for integrase A477 sequence
acaacacgaccggaaaaataccaaacggaaaaaatatgaatgcacaattccatgcagggattaatgaaagcggaaatattgaaatcatctttaacttattttccgatgcaaatttaacttttcatgcaaaaatttaaaagagagcctcctggcttttctttttaccgaaaaaagaacatacgtacggaaggagaaaggaaatgaaggcagctatttatatacgtgtttctactcaagagcaagtagaaaattattcaata

SEQ ID NO: 37910 - DNA, 260 bp, Unknown
  Description of Unknown: RightRegion for integrase A478 sequence
atctaaaatagtagaaaatatatatcaagaaatgaataaagaacaaaaagaaagcctaggattaaaaaatcatgaatttaaaaaaaatgctgagttaagtgataaagcaagaaaattaatatttagtggtaattaaaagagagccattaggcttttctttttaccaaaaaaaagaacgtatgtgcgaaaggagaacggaaatgaaggcagctatttatatacgcgtatctactcaagaacaaatagagaattactctata

SEQ ID NO: 37911 - DNA, 260 bp, Unknown
  Description of Unknown: RightRegion for integrase A479 sequence
atggattcgatgcaactctaaaaagattttataagttccaagatggaattactttagaacccgaaagttataatcctgaatataaaacacaattttatgattctaaaacacaagaacacactcctgttgtagtaaaaggaaaattagtttggtatatggcacctcttaacgctaaattttaaatgtaaaaggtgattattttgactaaagcagctatatatattcgtgttagtacgcaggaccaaattgaaaactatagt

SEQ ID NO: 37912 - DNA, 260 bp, Unknown
  Description of Unknown: RightRegion for integrase A480 sequence
tgtggagaaccatcagaactcaattttgagttttgactcatatcagacgggctcaattttgagccggttaaaagttggccacaattagacaacgcataatccaattttggattttgataaaagaatttagccgggctcaatttagatccgggctccatatcacgagagcgcaattttgcgctctcctctaaatcgttgatatgttggaggtatgtatgaagatagcagtttatgtcagagttagcacgttggaacaagcg

SEQ ID NO: 37913 - DNA, 260 bp, Unknown
  Description of Unknown: RightRegion for integrase A481 sequence
gttatcaacgaccaaaaatacaaaattttaaaattgtcaccgaagaaagtttttgattaattttaatgatactaagtatcattaaaattattaacgtattttttttgaagtaccacagttggggtcgtcaaccaccaattttttatccataaaattttgcataattttagtacacaagtagttaatatcttgggcattccaaaatgcaactcttttgtaatctcttagagtaccaccactctctaaaatattagtaaatt

SEQ ID NO: 37914 - DNA, 260 bp, Unknown
  Description of Unknown: RightRegion for integrase A482 sequence
agtgaagaagagttagtggaagaaatgaaagtgatcaacgaccaaagatacaacgtttaaaggttaaatataccttaaaaatcaaaaagtggctaccctccactagttgatttaatgaccgaatgggccattaaattaaaaacttgaacttaaccgaagggggtccccttcggttagaagacataattgattacactctttaactctttaaaattgaattccttcttattaaaaaattattaataaaaatggcaatagtt

SEQ ID NO: 37915 - DNA, 260 bp, Unknown
  Description of Unknown: RightRegion for integrase A483 sequence
actgaagaagagttaattgaagaaatgaaggttacaagcgaaagtaaacgtaatatttaaattaataaatttaaattattaataaatgggtaacactaccgcgtccgaaagtactattgaaccagaagataattgtgaacacggttttgataccaataccggttcttataatcatttgaacaatgatagtttggagtctatccactataaaaatgattataatggcgaaattctagaaggacatcctgtagctgatgtcc

SEQ ID NO: 37916 - DNA, 260 bp, Unknown
  Description of Unknown: RightRegion for integrase A484 sequence
gtcaggggagcccccgtcaggggtcagtctccaggagccgtttcaatgccaacgtacgatagatccatgcgcgtgataggccgactgagaatctcctgacaaaccgaggagtctacgtctatcgaacgtcagcgtgagctcatacagaactggctgatacccacgatcacgagatcgtcgggtgggccgaagacaaggatgtgtccggttcggtagacccgttcgacaccccagggctcggtccctggttgaagcgtgac

SEQ ID NO: 37917 - DNA, 260 bp, Unknown
  Description of Unknown: RightRegion for integrase A485 sequence
actgaaaaagagtttattaaaaaaatgaaggttattaataaccaaaaattatatgtttagattttaatgtttaattaaacattaaaattcatttgtagaaaattgatttttttttaaaaaaaaatagttaaataaactatacaatggaagacaaaaatattattatcaacgatactaaatataacttcttcaaattctataacgtaaatcaaccactaactgaacttaaatacttcaattgtgaaagattggtttttgca

SEQ ID NO: 37918 - DNA, 260 bp, Unknown
  Description of Unknown: RightRegion for integrase A486 sequence
ccccaggtgaagtcgcggctcgctcccctgtcgtcggtcgagcgagtgatcatctcctgaacgcagaaaagccccgcactccacaagggagccggggctgtctgctacgcggtgagtccgagaaggactctcaccacgcgaacttgctcgggagtgggaggcggaggcgcgggcctctgcctgtccagctcgatggcttcggcgagggtcagggcgcgaccctcccgtgcttctggaagcaccgccaggtgatcggcatc

SEQ ID NO: 37919 - DNA, 260 bp, Unknown
  Description of Unknown: RightRegion for integrase A487 sequence
acccaagatgagttgatagaagaaatgaaggttacaagtaaccaaaagtacaatgtttaaaaaagttttttaatgcttttagaaaagcatgtcaggaagtcatactgtatttttaaatggtacttcatattcatcaagcataaatttaatggtttaaataaccattaaatttaaacaaaacgatcaataataagatgagagttattggttgctggagaaccatctattgttacaatgtttggtccaacattttgaagttt

SEQ ID NO: 37920 - DNA, 260 bp, Unknown; identical to SEQ ID NO: 37918
  Description of Unknown: RightRegion for integrase A488 sequence

SEQ ID NO: 37921 - DNA, 260 bp, Unknown
  Description of Unknown: RightRegion for integrase A489 sequence
ccccaggtgaagtcgcggctcgctcccctgtcgtcggccgagcgagtgatcatctcctgaacgcagaaaagccccgcactccacaagggagccggggctgtctgctacgcggcgagtccgagaaggactctcaccacgcgaacttgctcgggagtgggaggcggaggcgctggcctctgcctgtccagctcgatggcttcggcgagggtcagggcgcgaccctcccgtgcttctggaagcaccgccaggtgatcggcatc

SEQ ID NO: 37922 - DNA, 260 bp, Unknown
  Description of Unknown: RightRegion for integrase A490 sequence
ccccaggtgaagtcgcggctcgctcccctgtcgtcggccgagcgagtgatcatctcctgaacgcagaaaagccccgcactccacaagggagccggggctgtctgctacgcggcgaatccgagaaggactctcaccacgcgaacttgctcgggagtgggaggcggaggcgctggcctctgcctgtccagctcgatggcttcggcgagggtcagggcgcgacccccccgtgcttctggaagcaccgccaggtgatcggcatc

SEQ ID NO: 37923 - DNA, 260 bp, Unknown
  Description of Unknown: RightRegion for integrase A491 sequence
ccccaggtgaagtcgcggctcgctcccctgtcgtcggccgagcgagtgatcatctcctgaacgcagaaaagccccgcactccacaagggagccggggctgtctgctacgcggtgagtccgaggaggactctcaccacgcgaacttgctcaggagtgggaggcggaggcgctggcctctgcctgtccagctcgatggcttcggcgagggtcagggcgcgaccctcccgtgcttctggaagcaccgccaggtgatcggcatc

SEQ ID NO: 37924 - DNA, 260 bp, Unknown
  Description of Unknown: RightRegion for integrase A492 sequence
ccccaggtgaagtcgcggctcgctcccctgtcgtcggctgagcgagtgatcatctcctgaacgcagagaagccccgcactccacaagggagccggggctgtctgctacgcggcgagtccgaggaggactctcaccacgcgaacttgctcgggagtgggaggcggaggcgcgggcctctgcctgtccagctcgatggcttcggcgagggtcactcgacccgctcctcgccgtacacccgactgatctcctcgcgaaggtgg

SEQ ID NO: 37925 - DNA, 260 bp, Unknown; identical to SEQ ID NO: 37921
  Description of Unknown: RightRegion for integrase A493 sequence

SEQ ID NO: 37926 - DNA, 260 bp, Unknown
  Description of Unknown: RightRegion for integrase A494 sequence
accgaagaagagttgatggaagagatgaaggttatcaacgaccaaaaatacaatgtttaggtatttaaaaatttaatggttaaaaaactattaaatttaaacaaaacgatcaatgataagatgagagttattggttgctggagaaccatctattgttacaatgtttggcccgacattttgaagtttaaccgaaaaagtaaactgtgaaagtggagaaaccgattttaatgctaccaattccacttgatttacgaaacctt

SEQ ID NO: 37927 - DNA, 260 bp, Unknown
  Description of Unknown: RightRegion for integrase A495 sequence
gacgaaaataaattagtggaagaaatgaaggtcattaacgatagtaaacgtgacatttaaaatattaatttttaaagttcaattgaactttaattaatttttaaagttcaatcaaactttaaaaatttaaacaatacatttgccaatttttgatttagaagagtgaaagtccacaaataatgatggatctttccattcgatatggttaatacaatccgtaaaatatttaaacgattttatatctttagttttactttcag

SEQ ID NO: 37928 - DNA, 260 bp, Unknown
  Description of Unknown: RightRegion for integrase A496 sequence
gatgagcaagaattagtggaagaaatgaaggttataaacgatagtaaaagagatgtttaattttaattaaaataattttaatgatacttagtatcattaaaattaacgtattttttttgaagtaccacagttggggtcatcaactaccaattttttatccataaaattttgcataattttagtacacaagtagttaatatcttgcgcattccaaaatgcaactcttttgtaatctcttaaggtaccgccagactgtaaaa

SEQ ID NO: 37929 - DNA, 260 bp, Unknown
  Description of Unknown: RightRegion for integrase A497 sequence
gatgaagaaaaattagtggaagaaatgaaggctacagatagtagtaaacgagatatttaaattattttaatgctaaagaagcattaaaataaatgcttataaatggtataatagctatatctcaagatggtggaattggaagtaataacactcttccttggaaattgaaagaagaacttaaacattttcaagatgttacgacttctactcaagatagtagtaaaaaaaatgctgttattatgggtcgaaaaacatgggat

SEQ ID NO: 37930 - DNA, 260 bp, Unknown
  Description of Unknown: RightRegion for integrase A498 sequence
tttaattgatgatttagaaaatttggcagatcatcaacctaacaatgttatttgtgttaaaccatttttttatgataaagaagaagcctacgaagataaagaattatttaaagttaaagatgctttaattaaaattacttaatttttagaaaaaatttattttttaacaattttttattgttaaaaaatacattaaataaatggaaacaaaaccaagactgacaattgaacaacgtgcaaatgtttttaaaaaataccaa

SEQ ID NO: 37931 - DNA, 260 bp, Unknown
  Description of Unknown: RightRegion for integrase A499 sequence
aaaaaattctaacagttgataaagttaaccataattctcatttgtttgttaatgcaaaattagaagaaaaagagccagaagtgtgtactttttgtgaaggttgataaaatttaatttttaaagtctaattagactttaaaaattgtgaataaatatgtataaaaatttttttagtttattttttaaactaaaaaaaagtaatgcaaggaagttataaaaacaagttaacgttggaacagcgtaataccatagttcaaatg

SEQ ID NO: 37932 - DNA, 260 bp, Unknown
  Description of Unknown: RightRegion for integrase A500 sequence
ccttcacaaatagatgaatggaacaaaacaaaaccaactactcacgatgaatcacaaatggaacaagtaccacaagaccattctggtggccacccctcaattttcggaacagatacgccaccaaaaaaataattaaataaatttatatgggtagtccgtctacccttattattttttacttttttagggagtgatgaattatgaacgtagctatttacgttcgtgtcagtacgttagagcaaaaagaacacggtcattct

SEQ ID NO: 37933 - DNA, 260 bp, Unknown
  Description of Unknown: RightRegion for integrase A501 sequence
gatgaagaaaaattagtggaagaaatgaaggctacagatagtagtaaacgagatatttaaattattttaatgctaaagaagcattaaaataaatgcttataaatggtatagtagctatatctcaagatggtggaattggaagtaataacactcttccttggaaattgaaagaagaacttaaacattttcaaaatgttacgacttctactcaagatagtagtaaaaaaaatgctgttattatgggtcgaaaaacatgggat

SEQ ID NO: 37934 - DNA, 260 bp, Unknown
  Description of Unknown: RightRegion for integrase A502 sequence
actgaagaaaaattaatggaagaaatgaaggttattaacgaccaaaaatataatgtttaaattaaggttttttaatctctgtatatagagattaaaaaacatgtttgaaattgtgtaatttcaaacaggtaataaatatgattgaacgcagtcttgctctattctttggtttgattgtaggccttatgggttacatatattcaaccaaaaagaaaactataaaagaaaattttttacccgctatgacttataaagtagac

SEQ ID NO: 37935 - DNA, 260 bp, Unknown
  Description of Unknown: RightRegion for integrase A503 sequence
accgaaaaagagttaatggaagaaatgaaggttattaatgaccaaaaatataatgtttaaattaaggttttttactctctatacacagagattaaaaaacatgtttgaaattgtgtaatttcaaacaggtaataaatatgattgaacgcagtcttgctctattctttggtttgattgtaggccttatgggttacatatattcaaccaaaaagaaaactataaaagaaaattttttacccgctatgacttataaagtagac

SEQ ID NO: 37936 - DNA, 260 bp, Unknown; identical to SEQ ID NO: 37417
  Description of Unknown: RightRegion for integrase A504 sequence

SEQ ID NO: 37937 - DNA, 260 bp, Unknown
  Description of Unknown: RightRegion for integrase A505 sequence
atttcagaagatgggcagataagtgtaaaattcttagaggggacagaggtagacttgtaagtgactgtgactgaaaggttgcagttttttcgttttagtggtataatagccgtataaatcataattgatggtgaattacatggaaaataatttgaatttcgatatttacgagcatcactttggagcattatattatcacataaaatctttgattggggaatcccctatctatgatgaaactattgatgaggaagatttaa

SEQ ID NO: 37938 - DNA, 260 bp, Unknown
  Description of Unknown: RightRegion for integrase A506 sequence
cattaaggaaggaaaagcagcttgtcaagggatgcgtgtgccagaagtagacatttcaaattgggagataacctcaccaattacagtattagaaagggatagaaatggggaaaagtattacagttattccggccaagaaagtgcagaccagcgttcttcatcaggtcaggaagaaaatcaaggtagccgcatattgtcgagtgtccaccgaccaagaagaacagctatcaagttatgaaaaccaagttaattattacaga

SEQ ID NO: 37939 - DNA, 260 bp, Unknown
  Description of Unknown: RightRegion for integrase A507 sequence
gataggattgagatatttgagaacggggatataaaaatcgtctacaggatagaaatgtagtctttactagctacaattatgcataacaaatgaaatgtataattgtaactagtaattacagttataaaaactttctcaatatttttcagaagaatgggagaatacatgttctcatttatatggtagaatattttgtaaatacagggagaagacgttatttgtttgagatgaagggggcttttcaattgagatttcacaaa

SEQ ID NO: 37940 - DNA, 60 bp, Unknown
  Description of Unknown: RightRegion for integrase A508 sequence
attgtggaggatggacagataactgtcagatttttagaggggactgaggtagaattataa

SEQ ID NO: 37941 - DNA, 60 bp, Unknown
  Description of Unknown: RightRegion for integrase A509 sequence
atttcagaagatgggcagataagtgtaaaattcttagaggggacagaggtagacttgtaa

SEQ ID NO: 37942 - DNA, 260 bp, Unknown
  Description of Unknown: RightRegion for integrase A510 sequence
atctcagaagatgggaagataagtgcaaaattcttagaggggactgaggtagatttgtaagtgactgtggccgaaaggttgcagtttttttcgtttttagtggtataatagccgtataaatcataattgatggtgaattacatggaaaataatttgaatttcgatatttacgagcatcactttggagcattatattatcacataaaatctttgattggggaatcccctatctatgatgaaactattgatgaggaagattt

SEQ ID NO: 37943 - DNA, 260 bp, Unknown; identical to SEQ ID NO: 37414
  Description of Unknown: RightRegion for integrase A511 sequence

SEQ ID NO: 37944 - DNA, 260 bp, Unknown
  Description of Unknown: RightRegion for integrase A512 sequence
atctcagaagatgggcagataagtgcaaaattcttagaggggactgaggtagatttgtaagtgactgtggccgaaaggttgcagtttttttcgtttttagtggtataatagccgtataaatcataattgatggtgaattacatggaaaataatttgaatttcgatatttacgagcatcactttggagcattatattatcacataaaatctttgattggggaatcccctatctatgatgaaactattgatgaggaagattt

SEQ ID NO: 37945 - DNA, 260 bp, Unknown
  Description of Unknown: RightRegion for integrase A513 sequence
gaaaagttgatagaagaaatgaaagttattaacgatcaaaaacttaatattagaatttaattatatttttaatggttattaaccattaaaaactactgaaggtatcccaattgttttaactttaattgaaggtaaccaccaatatcatttaattttatggtataaggcacctcaattaaatttataccattctcttgacacattcgtcttttaagttcatctctatatttttggttggttgaagcatcagtatttcgatg

SEQ ID NO: 37946 - DNA, 260 bp, Unknown
  Description of Unknown: RightRegion for integrase A514 sequence
ttagaagaagaacttattaaagaaatggaggttattaacgaccagagatacaacgtttaagtttattattttttaaactcatttttgagtttaaaaaattatattaattccggtaaaagtaaaccataaaaccaatttccattaacattaattgtaatagcatcgattgatggatcttttgttccaatagaatactgttttacactctgttgattaaaaacagttacgtttacttttgtttcatcgagaacaattttggt

SEQ ID NO: 37947 - DNA, 260 bp, Unknown
  Description of Unknown: RightRegion for integrase A515 sequence
actgaagaaaaattaatggaagaaatgaaggttattaacgaccaaaaatataatgtttaaattaaggttttttaatctctacacccagagattaaaaaacatgtttgaaattgtgtaatttcaaacaggtaataaatatgattgaacgcagtcttgctctattctttggtttgattgtaggccttatgggttacatatattcaaccaaaaagaaaactataaaagaaaattttttacccgctatgacttataaagtagac

SEQ ID NO: 37948 - DNA, 260 bp, Unknown
  Description of Unknown: RightRegion for integrase A516 sequence
ctgtcgaacatgaccgtggatgaccacgtcaccatcgagtggcgagacgtggccgagtagcagatacgacgaagccccggctacccccttctgagggtgccggggctttcgtgtgtcagttgtggtggccgctctccaggcggtcgatctcttcgagggacgcttcgtagttgccggcctcctggaggaggagcaggcggaggtcggcgagcttgacctgcacccacacggggagcttcttctcgcgctcgctgttgaag

SEQ ID NO: 37949 - DNA, 260 bp, Unknown
  Description of Unknown: RightRegion for integrase A517 sequence
gatgagcaagaattaatagatgaaatgaaggttatcaatgatcagcggtataacatttaattttttatttttaagttcatttgaacttaaaaataatttaatttaaagaattaaaatgggtatctataattacttaattatcaaacaggtaataaatatgattgaacgcagtcttgctctattctttggtttaattgtaggccttatgggctacgtatattcaaccaaaaagaaaactattaaagaaaattttttaccat

SEQ ID NO: 37950 - DNA, 60 bp, Unknown
  Description of Unknown: RightRegion for integrase A518 sequence
cttggagaagacggcagcatcaccattaagtttttagaaggaacagaagtgaatttataa

SEQ ID NO: 37951 - DNA, 60 bp, Unknown
  Description of Unknown: RightRegion for integrase A519 sequence
atatcagaaagtgggcagattactgtaacatttctcgaaggaacagaagttgacttataa

SEQ ID NO: 37952 - DNA, 260 bp, Unknown
  Description of Unknown: RightRegion for integrase A520 sequence
tacgagcagcatctcaggctcggcagcgtggtcgaacagctacacgccgggatgtcgtagagcggctacccccgagaacgcagaaaagccccctacgcgccgtgtaagggcacgcagagggctctctggtagtctctattcagttgtgtggttgcgtccgtcagcgtggacgctagaggggtttacggggcctttccagcctggcgtctgcgcccgcctgtaagggtgtgtgagcagtgcagtacgggtctacccggctg

SEQ ID NO: 37953 - DNA, 260 bp, Unknown
  Description of Unknown: RightRegion for integrase A521 sequence
gagcaagaattggtggaagagatgaaggtcataaatgatcaaaaacttgatattaaatagactatatttaacaatttttaatagttaattaaccattaaaaattactgaagatatcctaattgttttaactttaattgaaggtaaccgccgatatcatttaattttatggtataaggtacttcaattaaatttataccattttcttgacacattcgtcttttaagttcatctctatatttttggttcgttgaagcatcaa

SEQ ID NO: 37954 - DNA, 260 bp, Unknown
  Description of Unknown: RightRegion for integrase A522 sequence
tacgagcagcatctcaggctcggcagcgtggtcgaacggctacacgccgggatgtcgtagagcgactacccgagaacgcagaaaagccccctacgcgccgtgtaagggcacgcagagggctctctggtagtctctattcagttgcggggttgcgtccgtcagcgtggacgctagaggggtttacggggcctcgtggacccgtacgtacggctgcagaggcttgtcacggtaggcgtggtagcgctcggcctcctcgacgc

SEQ ID NO: 37955 - DNA, 260 bp, Unknown
  Description of Unknown: RightRegion for integrase A523 sequence
gaagaagaagagttgttggaagagatgaaggttatcaacgaacagaagtatgatgtttaacaagtaattctttaatggttttaaaaccattaaagtttttatttatttttagtagatgcaatgaaggttagccaaaaaaatgtttttaaagtctaattagaaattaaaaacaatcgtttgaaacagtcaagatcgaagcgttaaaaaataaaatgaaatttaattaataaaaaagagtaaaataaactatgactaaaaat

SEQ ID NO: 37956 - DNA, 260 bp, Unknown
  Description of Unknown: RightRegion for integrase A524 sequence
gtacgaaaggacgtgattagggacatgaaagtagcactttatgtccgtgtcaggtatcgacactagaacaagcagaagaaggttactcaattaatgaacaaaaagataaacttaaaaaatattgtgaaattaaagattggacgattgttaaagagtacgtagatcctggtcgctccggatcaaatatcaatcgccccagcatgcaacagcttatcaaagatgcagatacaggattatacgatgctgtgcttgtctataaa

SEQ ID NO: 37957 - DNA, 260 bp, Unknown
  Description of Unknown: RightRegion for integrase A525 sequence
attatccaagtcaacagtagtggatactccaggatctaatgtaactcctggtaatgataattttggtgcaagtttaacctccatttattttatactttattcatcctcatcttcatcaaatggattagtcgaccttggtcttgaagggatatgtaaaaaatttttttaaaaaaaaatttaccatttgtgtaataataaagatgagttcgcataaattgacaatagaagaacatcaaactattattgatttgtataacaat

SEQ ID NO: 37958 - DNA, 260 bp, Unknown
  Description of Unknown: RightRegion for integrase A526 sequence
aatattggtaaaagttcagttaaagagtttaagacaattcaacttgcaattgtagaataactcaagtatacttatttaaagccgcttgagaaatcggcgacttttgttttataaaggaggaaatatggaatataaagcaggtgatatagtggttgctagaaatattcataatgaaaataaggaatttattttcgaggttgacgatattgttgtacaagatggggtacaacttctttatggtaaagatgtttttagcggaa

SEQ ID NO: 37959 - DNA, 260 bp, Unknown
  Description of Unknown: RightRegion for integrase A527 sequence
aatattggtaaaagttcagttaaagagtttaaaacaattcaacttgcaattgtagaataaataaggtatagttgttttgggccgtttgatgagagtcggcggcttttgttttataaaggaggaaatatggaatataaagcaggtgatatagtggttgctagaaatattcataatgaaaataaggaatttattttcgaggttgacgatattgttgtacaagatggggtacaacttctttatggtaaagatgtttttagcgg

SEQ ID NO: 37960 - DNA, 260 bp, Unknown
  Description of Unknown: RightRegion for integrase A528 sequence
gttgaaatttaggaaagtgatctatggctgattttacaggaaaaacagctacattatcaaatacatagaaatggtcaataaccacttcaacgtccataggtatatttgtcatttattatttgcaatgtttaccctttaatcaaattgttgttaattaaatttttatgttaaatttaaatgttaaatttttcagtaaataaatggaaactaaaaaaaagttaacaactcaacaacgtttagatataataaaattttatcag

SEQ ID NO: 37961 - DNA, 260 bp, Unknown
  Description of Unknown: RightRegion for integrase A529 sequence
caaagtagccgcatattgccgagtgtccaccgaccaagaagagcagctatcaagttatgaaaaccaagttaattattaccgagagtttatctctaaacacgaggactatgagttagttgacatctatgcggatgagggcatctcagcaactaataccaaaaaacgtgatgcttttaaccgcttgatacaagattgtagggctggtaaggtggataggattttggtaaagtcgatcagtcgctttgcaagaaacacccttg

SEQ ID NO: 37962 - DNA, 260 bp, Unknown
  Description of Unknown: RightRegion for integrase A530 sequence
caaagtagccgcatattgtcgagtgtccaccgaccaagaagaacagctatcaagttatgaaaaccaagttaattattaccgagagtttatctctaaacacgaggactatgagttagttgacatctatgcggatgagggcatctcagcaaccaataccaaaaaacgtgatgcttttaaccgcttgatacaagattgtagggctggtaaggtggataggattttggtcaagtcaattagtcgatttgccagaaacacccttg

SEQ ID NO: 37963 - DNA, 260 bp, Unknown; identical to SEQ ID NO: 24961
  Description of Unknown: RightRegion for integrase A531 sequence

SEQ ID NO: 37964 - DNA, 260 bp, Unknown
  Description of Unknown: RightRegion for integrase A532 sequence
caatgtagccgcatattgccgagtgtccaccgatcaagacgaacagctatcaagttatgaaaaccaagttaattattaccgagattatatctccaaacacgaggactatgagttagttgacatctatgcggatgagggcatctcagcaaccaataccaaaaaacgtgatgcttttaaccggttgatacaagattgtagggctggtaaggtggataggattttggtcaagtcgatcagtcgatttgccagaaacacccttg

SEQ ID NO: 37965 - DNA, 260 bp, Unknown
  Description of Unknown: RightRegion for integrase A533 sequence
caaggtagccgcatattgtcgagtgtccaccgaccaagaagaacagctatcaagttatgaaaaccaagttaattattaccgagagtatatctccaaacacgaggactatgagttagttgacatctacgcggatgagggcatctcagcaaccaataccaaaaaacgtgatgcctttaaccgcttgatacaagattgtagggcaggtaaggtggataggattttggtcaagtcaatcagtcgatttgccagaaacacccttg

SEQ ID NO: 37966 - DNA, 260 bp, Unknown
  Description of Unknown: RightRegion for integrase A534 sequence
caaggtagccgcatattgtcgagtgtccacagaccaagaagaacagctatcaagttatgaaaaccaagttaattattaccgagagtttatctcaaaacacgaagattatgagttagttgacatctatgcggatgagggcatctcagcaaccaataccaaaaaacgtgatgcttttaatcgcttgatacaagattgtaaggctggtaaggtggataggattttggtcaagtcgatcagtcgctttgccagaaacacccttg

SEQ ID NO: 37967 - DNA, 260 bp, Unknown
  Description of Unknown: RightRegion for integrase A535 sequence
caaggtagccgcatattgtcgagtgtccaccgaccaagaagaacagctatcaagttatgaaaaccaagttaattattaccgagattatatctccaaacacgaggactatgagttagttgacatatatgcggatgagggcatctcagcaaccaataccaaaaaacgtgatgcttttaaccggttgatacaagattgtagggctggtaaggtggataggattttggtcaagtcgatcagtcgatttgccagaaacacccttg

SEQ ID NO: 37968 - DNA, 260 bp, Unknown
  Description of Unknown: RightRegion for integrase A536 sequence
caaagtagccgcatattgccgagtgtccaccgaccaagaagagcagctatcaagttatgaaaaccaagttaattattaccgagagtttatctctaaacacgaggactatgagttagttgacatctatgcggatgagggcatctcagcaaccaataccaaaaaacgcgatgcttttaatcgcttgatacaagattgtaaggctggtaaggtggataggattttggtcaagtcgatcagtcgctttgccagaaacacccttg

SEQ ID NO: 37969 - DNA, 260 bp, Unknown
  Description of Unknown: RightRegion for integrase A537 sequence
cagagtggccgcctattgtcgggtgtccaccgaccaagacgaacagctatcaagctatgagaaccaagtcaattactaccgtgactttatctcaaagcacgaagactatgagctagtggacatctatgcagacgaggggatttccgcaaccaacaccaaaaaacgtgatgcctttaaccgactgatacaagattgtagagatggtaaggtggataggattttggttaagtccatcagtcgatttgcgaggaataccttgg

SEQ ID NO: 37970 - DNA, 260 bp, Unknown
  Description of Unknown: RightRegion for integrase A538 sequence
caaggtagccgcatattgtcgagtgtccaccgaccaagaagaacagctatcaagttatgaaaaccaagttaattattaccgagattatatctccaaacacgaggactatgagttagttgacatctatgcggatgagggcatctcagcaaccaataccaaaaaacgtgatgcttttaaccggttgatacaagattgtagggctggtaaggtggataggattttggtcaagtcgatcagtcgatttgccagaaacacccttg

SEQ ID NO: 37971 - DNA, 260 bp, Unknown
  Description of Unknown: RightRegion for integrase A539 sequence
cagagtggccgcctattgtcgagtgtccaccgaccaagacgaacagctatcaagctatgagaaccaagtcaattactaccgtgactttatctcaaagcacgaagactatgagctagtggacatctatgcagacgaggggatttctgcaaccaacaccaaaaaacgtgatgctcttttacagaagacctacactgtggattttctcaccaagaaacgaacggaaaatgatgggcaggttaaccagttttatgttgccaaca

SEQ ID NO: 37972 - DNA, 260 bp, Unknown
  Description of Unknown: RightRegion for integrase A540 sequence
caatgtagccgcatattgccgagtgtccaccgaccaagacgaacagctatcaagttatgaaaaccaagttaattattaccgagattatatctccaaacacgaggactatgagttagttgacatctatgcggatgagggcatctcagcaactaataccaaaaaacgtgatgcttttaaccgcttgatacaagattgtagggctggtaaggtggataggattttggtcaagtcgatcagtcgatttgccagaaacacccttg

SEQ ID NO: 37973 - DNA, 260 bp, Unknown; identical to SEQ ID NO: 37429
  Description of Unknown: RightRegion for integrase A541 sequence

SEQ ID NO: 37974 - DNA, 260 bp, Unknown
  Description of Unknown: RightRegion for integrase A542 sequence
gtctttcctataaaaggtagaaaatatgaactgaaggttagaaaggagcacttcttatgaaaaacgtcataactattggagcaaatgcgcctaggaactcagagttagctagcatttcgctacctaagaaacgtcgtgtagcaggttatgcgagggtatcaactgatcatgaagaccaaacaaccagctatgaatctcaaatgaagtattatacagaatacatttcaagtcgaagcgattgggagtttgtcaaaatgtac

SEQ ID NO: 37975 - DNA, 260 bp, Unknown; identical to SEQ ID NO: 37429
  Description of Unknown: RightRegion for integrase A543 sequence

SEQ ID NO: 37976 - DNA, 260 bp, Unknown
  Description of Unknown: RightRegion for integrase A544 sequence
ataatgagatgacctaccaactaacaatgatacaagcaaagatacttttaaagaaaggatcaatcacaattgaggaatttgaactttttagacaattgatgcttgaaaaatatcaaccgtttataagtcaattatcgacctaataactggataattttttcttttagagtgatatatagtagcgaaaggagtgtattaatttgagaacagttagaagaatacaacccataaaatcgccctgcaagccaagatttaaggtt

SEQ ID NO: 37977 - DNA, 260 bp, Unknown
  Description of Unknown: RightRegion for integrase A545 sequence
tgggttataccagtaaaaggaaggaaatatcctatagaaattagagaggggcgatattagtgaagaaagtaattactattcaggctacaccaagtattattaggtcaagttcagatgatttctctttgaaaaagcgtagagttgcaggctatgccagggtatcaactgaccatgaagaccaagcaacaagctatgagtcacagatgcggtactactctgaatacattagtgggagggatgattgggaatttgttaaaatg

SEQ ID NO: 37978 - DNA, 260 bp, Unknown; identical to SEQ ID NO: 37977
  Description of Unknown: RightRegion for integrase A546 sequence

SEQ ID NO: 37979 - DNA, 260 bp, Unknown
  Description of Unknown: RightRegion for integrase A547 sequence
ccggatggcggcctactgccgagtgtccaccgaccaagacgaacagctatcaagctatgagaaccaggtccgttactaccaggactacattcggcagaatcctctctacgagttggttgatatctatgcggatgagggaatttcaggaacaaacaccaagaaacgcacggagtttaatcggttgataggtgactgccggaaaggaaaagtagatagaatcattgtgaaatccataagccatttttccagaaacacgctgg

SEQ ID NO: 37980 - DNA, 260 bp, Unknown
  Description of Unknown: RightRegion for integrase A548 sequence
ccccaggtgaagtcgcggctcgctcccctgtcgtcggccgagcgagtgatcatctcctgaacgcagaaaagccccgcactccacaagggagccggggctgtctgctacgcggcgagtccgagaaggactctcaccacgcgaacttgctcgggagtgggaggcggaggcgctggcctctgcctgtccagctcgatggcttcggcgagggtcactacggcgcgaccctcccgtgcttctggaagcaccgccaggtgatcggc

SEQ ID NO: 37981 - DNA, 260 bp, Unknown
  Description of Unknown: RightRegion for integrase A549 sequence
tttgtttacgggaatgaagaagagaggctcaaggagcttagaattctggagctcccttaacctcttcgtacagcaagaagaggcaaaccctttttatagttatgccccttcaagatttttagtggtgagaccatatggagcttgttgatgaaatcagatggttgagggaggctttgcaggacctcgaagacagggttattaattgggtgtcaagacccagggtttacacgagtctcagggaagcgtttgagcacactgca

SEQ ID NO: 37982 - DNA, 260 bp, Unknown
  Description of Unknown: RightRegion for integrase A550 sequence
ctctattttgacgacgacaacattcaaatactaacacttaagcgaggacaattgaaatgaagaaagtcattaccattgaacctgctagacctgttcaccaagtagaagaaacctcagtattcactaggcgaagagttgcaggctatgctagggtatcaacagaccatgaagaacaagcgacatcgtatgaagctcaaatgaagtactatacggattacattaacagtcgtattgattgggagttcgtcaaaatgtattca

SEQ ID NO: 37983 - DNA, 260 bp, Unknown
  Description of Unknown: RightRegion for integrase A551 sequence
cctaatgaagtaattccatcaaataatcactcgccacataaagagaaccccacatgttgagacggtagtattgctatcatgggtagacaagggatagagtagaaacatgtgtaaataagcgctttccgtgatttgagatctggctccaagctagaaagatagtcacggttttttattttatgggaacttatccaagaatggcagaatgtaaggttgagtggctatattgactttagagctcgtgagttgatgaaattgct

SEQ ID NO: 37984 - DNA, 260 bp, Unknown
  Description of Unknown: RightRegion for integrase A552 sequence
gctaaggtgacctatagaaatggaaaagaaaaacacgtcatcattcagaaaggacggtagacatgaaaaaagttatcacgatagaaccagctaaacaagtcacccatatggttgacctgcccagctttactaaacgacgagtggcaggttatgcaagggtatccactgaccatgaagaccagacaacttcatatgaagctcagatgacatactacacagactacatcaacagtcgctcggattgggaatttgtcaagatg

SEQ ID NO: 37985 - DNA, 260 bp, Unknown
  Description of Unknown: RightRegion for integrase A553 sequence
gctaaagctacctatagaaatggagaagaaaaacacatcatcattcagaaaggacggtagacatgaaaaaagtcatcacgatagaaccagctaaacaagtaagccataaggttgacctgccgagctttaccaaacgacgagtggcaggctatgccagagtatcaactgatcatgaagaccagacgacctcctacgaagctcagatgaaatactatacagactacatcaacaatcgctcggattgggaatttgtcaagatg

SEQ ID NO: 37986 - DNA, 260 bp, Unknown
  Description of Unknown: RightRegion for integrase A554 sequence
gctaaagcgacctatagaaatggagaagaaaaacacgtcatcattcagaaaggacggtagacatgaaaaaagttatcacgatagaaccagccaaacaggtcacccataaggttgacctgcccagctttaccaaacgacgagtggcaggctatgccagagtatccactgaccatgaagatcagacaacttcctacgaagctcagatgacatactatacagactacatcaacagtcgctcagattgggaatttgtcaagatg

SEQ ID NO: 37987 - DNA, 260 bp, Unknown
  Description of Unknown: RightRegion for integrase A555 sequence
tcaaacaaaggttcaagttttacaattttacaaaaaccaaaagtacaatcgtattcttaaaatcttttaaattgaataccattttatttagaaacttgtcttccaatttaattcggaaaacctttatgggctttcgcacaacattgattcatctatattaaataacaattggccttctgattctcattattctttcttgaaaaactcaagaaaaaccaaagaatgtattcgataagttagatttctttgtttaacctact

SEQ ID NO: 37988 - DNA, 260 bp, Unknown
  Description of Unknown: RightRegion for integrase A556 sequence
attagagaagacgatatccgtctgggtaaaataaaggaaactgaattatgtaccctgtagataaagaatccagaattcgtttaatggaagatctggacaaatggataaatgaacactacttagaaaaagtcaccgtcaaagacctaagtcaccaactaggtgtgttcatcccagatgtttaccgtctgtttgctgaacaacgcaacactaccccgggagagtacctccgacgtaaacgtttagttaaagccaaagctttg

SEQ ID NO: 37989 - DNA, 260 bp, Unknown
  Description of Unknown: RightRegion for integrase A557 sequence
caagctgaccaagaccatgtcttagttagactagaagtaaaacccaagacggttagagaagcgttcctgaacgcctataagcgagcgggaggcattcctgtagagtgggacaatcgtctcgctgtttaaaccagtatcctgcttgctcttcagcaagcaggattattgttgtttgttaaatattcattaaaggatttattatgtccatagatacactaggaatcgacgatgaaatcgttttgaccacaatagcgaacatt

SEQ ID NO: 37990 - DNA, 260 bp, Unknown
  Description of Unknown: RightRegion for integrase A558 sequence
agctgacaaagacaacatgttggtcagaatcgaagtgaaacctaaaacggttactgaagctttcttacaagcttatcgtcgagctggatttgaaactgttccctgggaaggtcgcatggcttcctaatctcattccctacttgcttaacggcaagtagggttatttttacaaactcaatataaatcattaaggattaattatgtccatcgagttgcctatcgctgaagatccaatcacagcattaacttttaagaacata

SEQ ID NO: 37991 - DNA, 260 bp, Unknown
  Description of Unknown: RightRegion for integrase A559 sequence
gattttgttgtacttgatcctagttggaaatcggaagacattcacgaagtttttaaataagaaagaggtaaattatgcgttttaaagattttaatcttgaagttgttaatgttgaacgttactcatcagattatagcatgacggtgaacaagaactttgttacatttagtaaaggaattgtccaagctttagaatacccagcacatgtactggttgcctttaataaggatacaaaggtaatgggtatacaagtttgtcgt

SEQ ID NO: 37992 - DNA, 260 bp, Unknown
  Description of Unknown: RightRegion for integrase A560 sequence
gattttgttgtacttgatcctagttggaagtcggaagacatccacgaagtttttaaataagaaagaggtaaattatgcgttttaaagattttaatcttgaagttgttaatgttgaacgttactcatccgattatagtatgacggtgaacaagaactttgttacttttagtaaaggaattgtccaagctttagaatatccagcacatgtactggttgcctttaataaggatacaaaggtaatgggtatacaagtttgtcgt

SEQ ID NO: 37993 - DNA, 260 bp, Unknown
  Description of Unknown: RightRegion for integrase A561 sequence
tatcgacctaataactggataattttttcttttagagtgatatatagtagcgaaaggagtgtattaatttgagaacagttagaagaatacaacccataaaatcgccctgcaagccaagatttaaggttgcggcctatgcaagggtttctgatagtcgtcttcatcattcactgtcaacacagattagctactataaccgtttgatacaagcgcatcctgattgggaattggtagggatttattatgatgaaggcataagc

SEQ ID NO: 37994 - DNA, 260 bp, Unknown
  Description of Unknown: RightRegion for integrase A562 sequence
gcatcatcatgttcatgtaggacgttaggggaaaagcgacttttggcatcgtttaaaagcaagttaggcattgtcccagataaagagtgggttgaaaataatattaaacacatcgagtatgactttggttaccgtatcctcagggtaactccagtaaaaggaaggaaatatcttatagaaattagagagggtcgatattagtgaagaaagtaattactattcaggctacaccaagtattattaggtcaagttcagatgat

SEQ ID NO: 37995 - DNA, 260 bp, Unknown
  Description of Unknown: RightRegion for integrase A563 sequence
ggcttttttgtaattaaacctcgaaaggatggaaacaatgagtatcttagacaactttgatgtggttggtgttcctcgtacattcagtattgcagaggttcgaatcctgaagaaccgcatctcctttaaccttgcaacagcttccgagattggctatccgccgtttgtgcggctgtttatcagcagagacaaaacgcagattgcgttgcagccttgtgccaaagaaacgccgaacgcgatgaagttctttacatcggatt

SEQ ID NO: 37996 - DNA, 260 bp, Unknown
  Description of Unknown: RightRegion for integrase A564 sequence
ttacagaggaagagtttatagctaagaaaaaaataattttagggatttaaggtgtaaagttaaccgttaaaaaataaaaaagccccacgctctcaaactttggcgagtctgagcgtgaggcgaattctagtatagtaaaaacctgctttaagtaggtctctttactgtactcattttaacaaaaaatgaggtaaaaaacaatgagaaaagtagctatttactctagagtatcaacaataaatcaagccgaagaaggatat

SEQ ID NO: 37997 - DNA, 260 bp, Unknown
  Description of Unknown: RightRegion for integrase A565 sequence
cgcaagttcaaggccgtcactggccagacgcccaacaaataccaagcaaattacgactaaagggttgcatattgcgatgccatagcttactatctctccatattgataggagaaaccacatgggcatcaagacagtcatatcagacaacctaaagagaatcatggccgagcacgacctatccagtaacgagctggctaaccgctctgggctcccacagaagaccctctattcgatgatccacggcacccacaacagccgc

SEQ ID NO: 37998 - DNA, 260 bp, Unknown
  Description of Unknown: RightRegion for integrase A566 sequence
atatggttccaaaatagacgttgtaaagacagaaagttattttttgaaaaaaataattagacataatttagtgttttgaattgtacaattaatttaattgcacaattcaaattcataaactattaatttccattgaaaattaattacaattttttatgaatcaatgtatatccataaaagattatatcatacagcaccattatcattaatgaaagtatattcagttgaatgtttagtccatttcactgtcgttgaatttg

SEQ ID NO: 37999 - DNA, 60 bp, Unknown
  Description of Unknown: RightRegion for integrase A567 sequence
agagacatagtttctagaaaaaatggaattttaatggggttgaaatgtgccggattttag

SEQ ID NO: 38000 - DNA, 260 bp, Unknown
  Description of Unknown: RightRegion for integrase A568 sequence
agagtgaagaaagaagaatatgaagctattttagttaagattcaatctttagttaagtaaacataatatttcataaggtcatctcttattagaaaataagaggtgactttttatgtctagaaaagaaataatagaaaattttattaaacaatcaaagaagcaattatctttaaaagaaatatcagagggaacaggcgttcctaattctacagttcataagatagtgaaggaattagggtatcaatgtgtaagacatcaag

SEQ ID NO: 38001 - DNA, 260 bp, Unknown
  Description of Unknown: RightRegion for integrase A569 sequence
aaacaccccctgcatcatccactctccatctacgactcattctgcagaggagtggcgtgatgatggaactgcaacatcaacgactgatggtgctcgccgggcagttgcaactggaaagccttataagcgcagcgcctgcgctgtcacaacaggcagtagaccaggaatggagttatatggacttcctggagcatctgcttcatgaagaaaaactggcacgtcatcaacgtaaacaggcgatgtatacccgaatggcagcc

SEQ ID NO: 38002 - DNA, 260 bp, Unknown
  Description of Unknown: RightRegion for integrase A570 sequence
tatgagccgttaagaagaagtgaacgaataaaaaatatggaagaaaaattgaataattaaatattctaaaaaatttatcgttaaagtagtgttatatacaatgtccgcaacattacttagtttaatttcgaaaatagaaaatccatcagattctctatcagcaattattgggttatctactcttggtggaattgttggtgtttattgtagtggtataacagaaaaagatgataaagaggtaaaaaacgaatcaattccta

SEQ ID NO: 38003 - DNA, 260 bp, Unknown
  Description of Unknown: RightRegion for integrase A571 sequence
cagatagacaaattagagtcctactgcaaaattaaggactggacggtttacaaagtatacactgatggaggtttttcaggatctaatactgaaagaccagcgctagagaaccttattaaagacgctgacaagaaaaatttgatacagttctagtttataagctagaccgcctcagccgtagtcagaaagatacactattcttgattgaggatgtattcatcaagaatgggattgaatttctgagcttgcaagagaatttt

SEQ ID NO: 38004 - DNA, 158 bp, Unknown
  Description of Unknown: RightRegion for integrase A572 sequence
ccatgggaagtgaaatttatatacgacggattgtaatattaagtgcaacacctataaaaattcataaaaaatgcccataattggcactttgttgtaagatgttaataaccaaaaaaacacatacaaggagtgccaacatgagctataaccatcttaca

SEQ ID NO: 38005 - DNA, 260 bp, Unknown
  Description of Unknown: RightRegion for integrase A573 sequence
ttaaatgaattggtttaacaacaaagtctataagactaataatagatccgtcagataacttgtaatgcgtgtctctaatatcgccaacaagttgtacaatttctaaagttgaatttgtttctggatgacggattgtaatattaagtgcaacacctataaaaattcataaaaaatgcccataattggcactttgttgtaagatgttaataaccacaaaaacacatacaaggagtgccaacatgagctataaccatcttaca

SEQ ID NO: 38006 - DNA, 260 bp, Unknown
  Description of Unknown: RightRegion for integrase A574 sequence
tttggatgcagtccgcaggcaatgcgcaacattctcaacaaacaccgggagtccgcatgaacgttatcatccacgatcaagattttcttgactacccgatcatggtagtcgacaccgagcttctggagaacacgctggaccctgagaccacggcgttcgagcgcgcgcaggaggcgctggcgcgcaaggaggtggtgctactcgtcaagcccgagcacataggacgcgtgttgtccaaagtccacaaacatgtgacagcc

SEQ ID NO: 38007 - DNA, 260 bp, Unknown
  Description of Unknown: RightRegion for integrase A575 sequence
ggagaagatggaaaagctcgaagaaagagtaaaaagtatagttcgaagatactaaaatgataggagaaaatatatgagagataaatattctaagtctaatattaataatgtttcgggaaatatttttaatggaccaaccaatattgcggcaggtaataattattataaggaagctgaagaagataaggttgcatcatatacaccagaacctgtttggagaagtccgataacaatggcaatgctttcatggatgggattta

SEQ ID NO: 38008 - DNA, 260 bp, Unknown
  Description of Unknown: RightRegion for integrase A576 sequence
aatcattatcagaaaggagcaaagcatggcgaaaaagattgtcaccatagaagcagttaagcctgtttgtcatcaagtagattttttaaggaaaagaaaagtggcaggatatgccagagtttccacagaccatgatgaccaagcaagctcttatgaagcacaaatgtgttattatgaaaactacattcaaagtcgtcatgattgggagtttgtgaagatgtattcggatgaggggataagtggaacgaatacgaagaaac

SEQ ID NO: 38009 - DNA, 260 bp, Unknown
  Description of Unknown: RightRegion for integrase A577 sequence
cactataatacagtcttcagatgtctgaagagaaataatcttacaaagatctgttcttagcttgctcgcgccacgcgtggtttcttggtaaatagcgccaaaacaccattcacggcgaatcggctactttgatgtttatgagaaacgtcgatatatatcgcatatcgacgttttcccctggctatagtgtcgtcgtttttgccaagagactgactccggacgacttctttctgttcaaacatattgtcgtttgtgagcat

SEQ ID NO: 38010 - DNA, 260 bp, Unknown
  Description of Unknown: RightRegion for integrase A578 sequence
caagttgattggttcgaaaatgaaagtgacagaggcgcatatggaagcacaggagagtaaagacgtattagaagagattaaaagaatacttcgcaaagagtaaggagtagataaagtgaatattaaaaaagcgagaaaaaaaccagtagaaattgagtttatgcaatttaataatatagacaatgcgtatgatatttcacaatgggcagtaggaaaaattaaatataaggtatcacgtaagtttaatataggttatatgt

SEQ ID NO: 38011 - DNA, 260 bp, Unknown
  Description of Unknown: RightRegion for integrase A579 sequence
gcgggttcgataccgaaaaatgcgttagatgaaaggaaacgcgaccgctttgaaagttagagattcttttaagtttagaataaactaataaattgctatgattccgattttctatttcaacaaatcattttcgatgaatggggatatacactatgatttcatacaaagaattaaaacacaatataacgcccgtaagttttaacgaaatcgacttcgatattttggaacaacacctgaatattagaatcgatgattttacg

SEQ ID NO: 38012 - DNA, 260 bp, Unknown
  Description of Unknown: RightRegion for integrase A580 sequence
ctttggattccgataactaaagctaaaaaaataccagttaatctatctgataccttttaacgatatctcgataggacttaaaggcgaaatcgcggttcgcttcctgcaaggaactgaggtagatttatagagtaaagaaaggctgtgacgacagtgggaacccactgtggttacagccttttttgcgtttttgtggtagaatcaaattgtagaacaatttggaggtcataagatattagtcgactttatgattcgattga

SEQ ID NO: 38013 - DNA, 260 bp, Unknown
  Description of Unknown: RightRegion for integrase A581 sequence
caacaagagaaagcaagaagaagtttacacaacaagaaaaaggaggggcgtcatgactaaaaagattattacgatagaacctgcaaaaatcttacgatcatcagaactacccagtctaaagaaacggaaagttgcaggttatgcaagggtatcaaccgaccgtgatgaccaagcgtcttcatacgaatcacagatgaaatactatactgattatatcggtagccgttctgattgggaatttgtcaaaatgtattctgatg

SEQ ID NO: 38014 - DNA, 260 bp, Unknown
  Description of Unknown: RightRegion for integrase A582 sequence
ttgtggactggtatatggcaatcattaaagctgcacaaaataaaggctatgtatggcgatctaaaaaatggttttcaggtaaaaagcaaacgttcttctgtcatgattgtgggaataacttttctgcttaaaattatgaacttaacaaaaaataaaaaaagtcctccaagttttgttcgaggaggaggacttaatcacaaatgtatagcaagacacacaaaagatgtgatgttttactatgctcaattttaacacagaat

SEQ ID NO: 38015 - DNA, 260 bp, Unknown
  Description of Unknown: RightRegion for integrase A583 sequence
aaggccgacgccgagcccggggccggagtcggcgaccgcatgcacttccactgggcctaggggcagtagttcgtggtcttcgtcgacacgccctgctccgcgagcgcacttgcgatcgcggggtagtcggagtggtagtcggcgaacacgtaggacgtcccgtccgtcaggacctggaaaccaggatcgatgtagccctcgctgcaggcgcgtgccctgagagttgctgactctgaccagtccgacgagagcgaaaacga

SEQ ID NO: 38016 - DNA, 260 bp, Unknown
  Description of Unknown: RightRegion for integrase A584 sequence
aaggccgacgccgagcccggggccggagtcggcgaccgcatgcacttccactgggcctaggggcagtagttcgtggtcttcgtcgacacgccctgctcctcgagcgcacttgcgatcgcggggtagtcggagtggtagtcggcgaacacgtaggacgtcccgtccgtcaggacctggaaaccaggatcgatgtagccctcgctgcaggcgcgtgccctgagagttgctgactctgaccagtccgacgagagcgaaaacga

SEQ ID NO: 38017 - DNA, 260 bp, Unknown
  Description of Unknown: RightRegion for integrase A585 sequence
aaggctgacgcggaacccggggcgggcgtcggcgatcgcatgcatttccactgggcctagggggcgggtgcccagcgttgcccgccgtagccgtcggccgcgatgcatcgcatcggcgtgcctgaggcgtcctcgctgcgctcgccgacggccgggcacggccccgacaggaccactgggtcctgggtgggctcctcggtgtacgtaggcgccggctcggtgttcacttccagcgttggcatcagcccggtgcagttgaa

SEQ ID NO: 38018 - DNA, 260 bp, Unknown
  Description of Unknown: RightRegion for integrase A586 sequence
aaggccgacgccgagcccggggccggagtcggcgaccgcatgcacttccactgggcctaggggcagtagttcgtggtcttcgtcgacacgccctgctcctcgagcgcacttgcgatcgcggggtagtcggagtggtagtcggcgaacacgtaggacgtcccgtccgtcaggacctggaaaccgggatcgatgtagccctcgctgcaggcgcgtgccctgagagttgctgactctgaccagtccgacgagagcgaaaacga

SEQ ID NO: 38019 - DNA, 260 bp, Unknown
  Description of Unknown: RightRegion for integrase A587 sequence
aaagccgacgccgaacctaaggccggagtcggtgaccgcatgcacttccactgggcctaggggcagtagttcgtggtcttcgtcgacacgccctgctccttgagcgcacttgcgatcgcggggtagtcggagtggtagtcggcgaacacgtaggacgtcccgtccgtcaggacctggaaaccgggatcgatgtagccctcgctgcaggcgcgtgccctgagagttgctgactctgaccagtccgacgagagcgaaaacga

SEQ ID NO: 38020 - DNA, 260 bp, Unknown
  Description of Unknown: RightRegion for integrase A588 sequence
aaagccgacgccgaacccggagccggcgtcggcgaccggatgcacttccactgggcctaggggcagtagttcgtggtcttcgtcgacacgccctgctcctcgagcgcgctggcgatcgccgggtagtcggagtggtagtcggcgaacacgtacgaggtcccgtccgtcaggacctggaagccgggatcgatgtagccctcgctgcaggcgcgtgccctgagggttgctgactctgaccagtccgacgagagcgaaaacga

SEQ ID NO: 38021 - DNA, 260 bp, Unknown
  Description of Unknown: RightRegion for integrase A589 sequence
aaggccgacgccgagcccggggccggagtcggcgaccgcatgcacttccactgggcctagggacagtagttcgtggtcttcgtcgacacgccctgctcctcgagcgcacttgcgatcgcggggtagtcggagtggtagtcggcgaacacgtaggacgtcccgtccgtcaggacctggaaaccaggatcgatgtagccctcgctgcaggcgcgtgccctgagagttgctgactctgaccagtccgacgagagcgaaaacga

SEQ ID NO: 38022 - DNA, 260 bp, Unknown
  Description of Unknown: RightRegion for integrase A590 sequence
agtcaaaataacgcacgtcacgcaagcagtcagaataacacaaaccacctacatcaaacctcaaatcacagaatattcaaaacccacaaaaattaccatcgcacctatatcaccaccatcatcagtaggcctatacaaaatttcatacagaaaaaattgataataaacacatataataacaaaaatatatattaatccatatgacaaaccacaccaaatacacaacaaatccaattgacacaatatatgtctacacaagg

SEQ ID NO: 38023 - DNA, 260 bp, Unknown
  Description of Unknown: RightRegion for integrase A591 sequence
ttttaagcgtaatagtagcattaatttctagcccatttatagtttcgtttttaagtaagttatttaatataaagaattaaaaaaatcccacgctctcaaagtttggcgactctgagcatgggatcagaaaggatagtaaagaacctattttgtaggtctttttactatacccattttaacaaaaagtgaggtattagacaatgaataaagtagcaatttatgttagagtttcaactactaatcaagctgacgagggatac

SEQ ID NO: 38024 - DNA, 260 bp, Unknown
  Description of Unknown: RightRegion for integrase A592 sequence
cattcacgcgccaaagtcaggggatatttgggccgaaacatttacgggaattaaacttgaggacagtccatttgtcgaaaaagacaaagccaaacttgctaaaacccttgaaaaactagacgcggaaattcacgcgcacctagtgaatattaatcactggtctgtcactgagggcaatgaggaaggggaagacaaaaccaatggcaaaaaataaacaaacagccattgcttattaccgtgtcagcacggcaaagcagggc

SEQ ID NO: 38025 - DNA, 260 bp, Unknown
  Description of Unknown: RightRegion for integrase A593 sequence
atcaagcaagatggattagactataagaagaaaaataaatatacgacaataagtgcttaagggggatgattaatgttagttactgtatttcacgcgtctttacacaagatcgataagtttgaaatcccataccaaggattgcattttggttctttcgagtcagcacttcaagcagtagagaggaagtgtgagcaaaatggtaccgatgagttctacctacacagagtgttactagatatcactacttgcgaggatgtttt

SEQ ID NO: 38026 - DNA, 260 bp, Unknown
  Description of Unknown: RightRegion for integrase A594 sequence
ctcaacgagtcgactttgtatgactggatcaaccgccagaaagccaagggaaatctatgagtcgccgcaaggaggagtagttggaccgctgccaatccggcccatactgcgtggccgccacccccgacggcgcggccctcaccaccaagatcatatgccagaggtgcctcacaagactccaggaacaatacgacgagctccccaccatccggagagttctggagatgttcaaagggggattgtggggccagtccggcgaa

SEQ ID NO: 38027 - DNA, 260 bp, Unknown
  Description of Unknown: RightRegion for integrase A595 sequence
ctgaatgaatccactctctacgactggatcaaccgccagaagaaaaagggaaacctatgagcatctacttcgagatccccgaagggcaaatgatcgaaggcgtattcgaggtggggcccggcgccaacatccgggaattagcccccggtaagtatgcgatcctccccgacctcaacgccccctcggggggctggaccccattcaacgccgacggcgagattgactccgaacgcctcgcggccgagggctgggcggtcctc

SEQ ID NO: 38028 - DNA, 260 bp, Unknown
  Description of Unknown: RightRegion for integrase A596 sequence
ctcaacgagtcgactttgtatgactggatcaaccgccagaaagccaagggaaatctatgagcatctccatgcgtgctgtgaccgccgatggaatccttgaaaaagatgacaaggccgtcgagcccgaggtgttcaccttccctggcggggagcaccacctccgcaacatccctgatcatccgaatatcaaggcctgggtggcgtgtgtgcgggggagtgaccccaacgacttggtgaaggccggtctgctatccgatgtc

SEQ ID NO: 38029 - DNA, 260 bp, Unknown
  Description of Unknown: RightRegion for integrase A597 sequence
ctgaatgaatccactctctacgactggatcaaccgccagaagaaaaagggaaacctatgagcatctacttcgagatccccgaagggcaaatgatcgaaggcgtattcgaggtggggtccggcgccaacatccgggaattagcccccggtaagtatgcgatcctccccgaccccaacgcccccgcggggggctggaccccattcaacgccgacggcgagattgactccgaacgcctcgcggccgagggctgggcggtcctc

SEQ ID NO: 38030 - DNA, 260 bp, Unknown
  Description of Unknown: RightRegion for integrase A598 sequence
ctgaatgaatccactctttacgactggatcaaccgccagaagaaaaagggaaacctatgagcatctacttcgagatccccgagggcaaatgatcgaaggcgtattcgaggtggggcccggcgccaacatccgggaattagcccccggtaagtatgcgatcctccccgaccccaacgcccccgcggggggctggaccccattcaacgccgacggcgagattgactccgaacgcctcgcggccgagggctgggcggtcctcg

SEQ ID NO: 38031 - DNA, 260 bp, Unknown
  Description of Unknown: RightRegion for integrase A599 sequence
ctgaatgaatccactctttacgactggatcaaccgccagaaagcaaagggaaacctatgagcatctacttcgagatccccgaggggcaaatgatcgaaggcgtattcgaggtggggcccggtgccaacatccgggaattagcccccggtaagtatgcgatcctccccgaccccaacgcccccgcggggggctggaccccattcaacgccgacggcgagattgactccgaacgcctcgcggccgagggctgggcggtcccc

SEQ ID NO: 38032 - DNA, 260 bp, Unknown
  Description of Unknown: RightRegion for integrase A600 sequence
ctcaacgagtcgactttgtatgactggatcaaccgccagaaagccaagggaaatctatgagtcgccgcaagggggattagttggaccgctgccaatccggcccatactgcgtggccgccacccccgacggcgcggccctcaccaccaagatcatatgccagagatgcctcacaagactccaggaacaatacgacgagctccccaccatccggagagttctggagatgttcaaggggggattgtggggccagtccggcgaa

SEQ ID NO: 38033 - DNA, 260 bp, Unknown
  Description of Unknown: RightRegion for integrase A601 sequence
tgaaaaagttttttactggggtgatagaaaaatcactcaagcgactgctgaaaaacgttgtgggtatttcaaggggtaatgcttatgactactataactctcaaaacttttacattttacgctattaataataagtctttttataaattgttggatagcttgctatcaagtaatcagttgagagcaggcagtggattacaatgaaagtagctatatatgttagagtaagcactaccttgcaagctgaaattggctattcc

SEQ ID NO: 38034 - DNA, 260 bp, Unknown
  Description of Unknown: RightRegion for integrase A602 sequence
tcagaatcgatgaaaggaagaaagagtatagaggagagaataaagagccgttcggaataaacggctctttattctcaatcgatatagagaaactgtgagaacgtgaataaagagccgctcggaataaacggctctttattctcaatcgatatagagaaacgatgagaacgtgaataaacggctctttattcttaatcaatagaacaaaactataagagcagcgatcaaatctcagtctgagtaaaagggtcgctaattct

SEQ ID NO: 38035 - DNA, 260 bp, Unknown
  Description of Unknown: RightRegion for integrase A603 sequence
accaagatccaaaagatacatcaattaagtttgatgacaatccaataagaaattcagaaagagtgaatattgattttagttccgatagtgaacaataattaaaaaattgaattttgaatttatatagtggtccaattattattggaccatcagtattcctttatcgactataattgttcgttgtgtaaggaaattaatttatgaataacactaattattcaaaaaatgctggcacggcattagatgctggtatggcatta

SEQ ID NO: 38036 - DNA, 260 bp, Unknown
  Description of Unknown: RightRegion for integrase A604 sequence
aaatacaatggtttcggtcttattgcagaagtattttcacgatggtgtgaatggtcctaaaaaattgaatcagggtgaactcgaaaaatattttatagaggataatcatgaagctattatttccatggaggttggccaaacagtcaagacaaactagcagcaaaaaggtagaaacaaaacctataaatttacggggttattaaagtgtcagcattgtggttcgactttaaagagacaagtttcttacaagaaaaaaattg

SEQ ID NO: 38037 - DNA, 260 bp, Unknown
  Description of Unknown: RightRegion for integrase A605 sequence
tcggcatgtaaggcaagatgggcaacaattaaatatgattacccttacatcatgtattaaaaactttttataaaatttgtttacacttttgattatgtatgttataatttatatatattataaaggagtggttttatgggtacaaaattattggtttatgaattagaagatttacaagaagaaccatttggttttgaagttgaaaatctaacacctcgtgattggagagagatttcttcttatgttgaattatctgaaga

SEQ ID NO: 38038 - DNA, 60 bp, Unknown
  Description of Unknown: RightRegion for integrase A606 sequence
atatcagaaagtggacagattactgtcgcctttctggaaggaacagaagtcgacctgtag

SEQ ID NO: 38039 - DNA, 260 bp, Unknown
  Description of Unknown: RightRegion for integrase A607 sequence
ttaaaaaacgaaaatacaaaggatctttactacttcaaaaatactttcatgatggtgtaaacggtccaaaaagattaaatcaaggacaggttgaacaatactatatcgaagataatcatgaaggaattgtatctaaggaaatatgggagaaggttcaggtaaaaataaaaagccgttctcggatccaaggtacaaataaaacctataaattttccagaatgttaaaatgccaatattgtggttcaacattaaaaagacaa

SEQ ID NO: 38040 - DNA, 260 bp, Unknown
  Description of Unknown: RightRegion for integrase A608 sequence
ctgaatgaatccactctctacgactggatcaaccgccagaaagcaaagggaaacctatgagcgcggagatattaaaagaagcccgggacatcgtcgccaaagggtggataaaaggcgactacacagacgatcaggggaactactgcgcactgggcgcgctaggggaagcggttatgcgcaatggccttttcccctatgttgtctgggagaccaggacgaggctccaggaccacttgccagatctcgggtggaagggacgg

SEQ ID NO: 38041 - DNA, 260 bp, Unknown; identical to SEQ ID NO: 38030
  Description of Unknown: RightRegion for integrase A609 sequence

SEQ ID NO: 38042 - DNA, 260 bp, Unknown
  Description of Unknown: RightRegion for integrase A610 sequence
ctcaacgagtcgactttgtatgactggatcaaccgccagaaagccaagggaaatctatgagtcgccgcaagggggattagttggaccgctgccaatccggcccatactgcgtggccgccacccccgacggcgcagccctcaccgccaagatcatatgccagagatgcctcacaagactccaggaacaatacgacgagctccccaccatccggagagttctggagatgttcaaggggggattgtggggccagtccggcgaa

SEQ ID NO: 38043 - DNA, 260 bp, Unknown
  Description of Unknown: RightRegion for integrase A611 sequence
cacggtgcgcccgccgacaccgcccgacccgacgtggaggattcctgtgcaaccgcatgacccccgaacccgacagagcatcgagcgctcgaccttcgcgcgcacgctgcgccagttcgtggcccggcagaccctgctgctggccaacaacgtgaccctgctggccgagatccgcgacgacatcgcggccggcgccgaggcggtgccgcgcatcaatctggcgatggccaagctgcacgagcgcatgcgcgcactcagcg

SEQ ID NO: 38044 - DNA, 260 bp, Unknown
  Description of Unknown: RightRegion for integrase A612 sequence
ctgaatgaatccactctctacgactggatcaaccgccagaaagcaaagggaaacctatgagcgcggagatattaaaagaagcccgggacatcgtcgccaaagggtggataaaaggcgactacacagacgatcaggggaactactgcgcactgggcgcgctaggggaagcggttatgcgcaatggccttttcccctatgttgtctgggagaccaggacgaggctccaggaccacttgccagatctcgggtggaaggggcgg

SEQ ID NO: 38045 - DNA, 260 bp, Unknown
  Description of Unknown: RightRegion for integrase A613 sequence
tttagaggaaaggaatggaatacttcgagagtaaaatatgtctccaaatcatctgtataattatattttttataaacataatacctcatatatgttttgcaaaaattttctaaattttataaacataatacctcatatatgttttgcaaaaattttctaaattttatagatcgctgttgaaacctcttgcaactaggaaatcgttttgatctttcttcatacacaaacaaccagcattttgccatccgttgtcacacata

SEQ ID NO: 38046 - DNA, 260 bp, Unknown
  Description of Unknown: RightRegion for integrase A614 sequence
gggaccatccatgcgtgggccactccgctgtcggccgccagctccgtgagggcggtgaacgacagggagaacgcgaggccgccaacgaacacggtgcctgcggtagccagcttgacgggagagagcatcggagcctttcgggggatgtgatgttcgaggagtagaacatcacttttaccaaactccggtatccttgtcatatgcgagttctgggaagattgcgtttgtcgaggtcaacggaggaatccacctccatcgag

SEQ ID NO: 38047 - DNA, 260 bp, Unknown
  Description of Unknown: RightRegion for integrase A615 sequence
aagccttggaatggtaggtcattagcgaccttctcgaaaaggaatggtattgaattgtaaaggagaaagaataatggatattaaactagaagattatttaacggaaggagaaatcaaagataccttacgtcaagcattacgtgacaagtgtgaaaactatgtagttcataacttcgagcgtatgatctcgaattcagcctaccattgtgtctggcaaagtgtagatgaagtcattgatggaacattcaagcagcaacttg

SEQ ID NO: 38048 - DNA, 260 bp, Unknown
  Description of Unknown: RightRegion for integrase A616 sequence
gaagtctatggagttaatattgttgagctccgggaaactttgagaggtgttcgtgtctgataagaaatcgaaagaactcaagaagctcaaaagtgccgccaagaaatattgtttggaacctaatgcctcggaattagtgttaaagaaaaccctgttttctttacctaaagtcattaaaatgttccgtgatgcaggtgagggaagtttgtatgattacatcactcatttaaaaatgctggaggcgaagaaactcttagatg

SEQ ID NO: 38049 - DNA, 260 bp, Unknown
  Description of Unknown: RightRegion for integrase A617 sequence
gttggttcggattatgaatacgacatcagaagacacttaatggctaactacggactgactcctgcggagatccgtaaacataaaggtccacttactcgtcgtaacaaaaccaagcagtttgttcgctttgttaaaactaacgccgacttatgtattagagaagacgatatccgtctgggtaaaataaaggaaactgaattatgtaccctgtagataaagaatccagaattcgtttaatggaagatctggacaaatggata

SEQ ID NO: 38050 - DNA, 260 bp, Unknown
  Description of Unknown: RightRegion for integrase A618 sequence
taagaggagctataatattcgttaagaacattgtatagtcatttttaatttcgacaatgttacgttcgtaaaaatgtgtcatcgttatataatcatccatgagagatttacaaattgaatttaaacgtaatagtgggggaaaaaaattgatattaatattcgtacaggtggattgttttgatgattaggagtataaatatatgagtcaattaggggcaatttattgtagaaaaagtagtgttgggaaatatgcgattaag

SEQ ID NO: 38051 - DNA, 260 bp, Unknown
  Description of Unknown: RightRegion for integrase A619 sequence
tctaagcttatcaagaagcatggtatcccttacaaaaagaaatcacgttggaataaataactacaggagtgatctatgtaccagaacataaataaaaatttcccagagatcacagaatcttttgaggtattgatgtcctacccaatcggtaagatcttcacctcagacacaccctctgggaaggagaagaaacttgagcagaggtgtactaaactggtagacagttattactctattgagagtatccgtcatcagcgtat

SEQ ID NO: 38052 - DNA, 260 bp, Unknown
  Description of Unknown: RightRegion for integrase A620 sequence
caatattataattgcacgccacgtgaatatgcaaaacatcagttattatctggaaaataagatgcatttatctcccagataatattgtaatattaaactcagtcagcatttagtagcagagcattatctatgatgatctgctcccattcttcgaatgcccgatcgcggacgccctggggaacactgttagttttgaaatcgacgaccgtacgccatttcccgtccggacggtacatgcgcagagctttacttcccccttc

SEQ ID NO: 38053 - DNA, 260 bp, Unknown
  Description of Unknown: RightRegion for integrase A621 sequence
cattacgtaaacaacaacgtgaagagttacaagagttgattgccaagaagcagaaggaagctaagtcagaaaaatctgttgaagagttacaagcagaactgttggcattagaggctggaaaataattaaaataaaacgttgacaccgatccccgatgtgctatgattcgtttatagcaaatacatcggggattttttattatgactatatatgcatataaaaggtgttcaacaaatgaagacaagcaagatactgctcgt

SEQ ID NO: 38054 - DNA, 260 bp, Unknown
  Description of Unknown: RightRegion for integrase A622 sequence
aaaggaaataaattttacccaatacaagtaagcaacttaatcaaattatatgaaaactaatatgaaagttaatatagagaatttaatcgataagagtcctagggagttgaacatccttaagaaagagtatttagataacatggatttcgtaagcgcttgcgaggtaaagagcttcgctaggcattgtacaaaaataaaaatgttggtgaaaagggggggtcaagaacaataaaataaaagggttatctttgtagtgtaac

SEQ ID NO: 38055 - DNA, 260 bp, Unknown
  Description of Unknown: RightRegion for integrase A623 sequence
aatagaaaaaaaatatccgacaagtttttagatacacgtaaaaacgcgattaaacaataattttttgtagggtttaaccctatatattaataatataatttcgtgaaattccatgaaaacccgtgaaattccatgaaacattttattataaactttataaactttataaagtctattaatcactactaaataatattaaagtctattaatcactactaaataatattaaagtctattaatcactactaaataatattaaa

SEQ ID NO: 38056 - DNA, 260 bp, Unknown
  Description of Unknown: RightRegion for integrase A624 sequence
tttaaacaacactaccgtacgcatcctcaatcgtacgcgaatgcattcaagagaaaatgaatatgactgaccacgaattagcactacaaatccaagactacgttaaagaaatctatatgaaacctcgtccatctaacttggtttacactaagttcaatatgagtggacctgtcatgggacgtttcttggaacgattaaatcatccttcaatcaaagtaatgttggtggaagcccgtatggagcgagcgaaagaactccta

SEQ ID NO: 38057 - DNA, 260 bp, Unknown
  Description of Unknown: RightRegion for integrase A625 sequence
gtatggaacgtattttcagcgtagcgaccagtggcaagcgcagttcgttctgtacttcttttaaacgtcatttcggcttgaccccgacagaagctcgcaaacatccagaacgtgtaatgcgtttaaaggacaccgagcaattcaaaaagtacatcgaagtcggagtcaaaaacatagaactacattaaaggtttattaccatgcaacaatcgttcagagaacaattatttcaagacaccttaaaatgggtcgataaaaac

SEQ ID NO: 38058 - DNA, 260 bp, Unknown
  Description of Unknown: RightRegion for integrase A626 sequence
ttttaacttactgtacactttgtcatctaatcttactacaaatgccttcattacaatcctttcattctctgcctaaatgcactctttctgggaaggaaaaaacgtgaaataaaaaaagtacatttaggtattgtaataatatcaaaaatatataatatgtatactaggcaatgttgcctattacaaaggagaaaagataaatgtggaaaataggagcaataagattgagtgacagtgcagcagaaaaagctaggcagatg

SEQ ID NO: 38059 - DNA, 260 bp, Unknown
  Description of Unknown: RightRegion for integrase A627 sequence
aaacgttttacggtaggtcctaaacactatcgtcaactaaaattaatcaaggctatataactggggtgtaatactatgtgggtaatgactagctgaccatctaaatgaagaattgaacaatcttggtgtataccgcaattgacgacataatttggaatctatcctcggcacccacatcaccctttcactaattgggtgtacaaaacgggtataaagcgcaaggccgtcattttacgatgacggcacttattatgttggaa

SEQ ID NO: 38060 - DNA, 260 bp, Unknown
  Description of Unknown: RightRegion for integrase A628 sequence
ttcaagtatggcaaattacattttaaaagagtcagaggaaaagttcagtgtaagtactgatagtgagcagttctacttggtcacagcactgattaacaccgttgctggcctaaaagaagaagatcaaccatcatatcgcaatattcaaaacattatccagcagataataacggaaaatctctatctagatggcactgtatgtgccttggttagctatggtcgggatcgaaatactaacaggaaaacctacgtcgtccatg

SEQ ID NO: 38061 - DNA, 260 bp, Unknown
  Description of Unknown: RightRegion for integrase A629 sequence
aaggtttgggatggtaaatccttagctgttttcgcaaaacgaaatgaaattaaattgtaaaggagaggtggacagatgacacattcacttagagaaggattatcaagaagtttgcaagacctaggatcacttgtagatgttaaagtattgtcagaggtacacagtccgatcctatatgtagaaattatagtattaagtacattgcaagatgatacgattgctagtattattgctaaacatctaccaattgttactcagac

SEQ ID NO: 38062 - DNA, 260 bp, Unknown
  Description of Unknown: RightRegion for integrase A630 sequence
ttttgaactaatattattatctctttggttcaacaccaaagtattggatagtattaagaggcaatggacatttgagaatgtcgctatggtttatattataagctgggtaattttcctagctggaaattattaaaataaatattgacattataaacccagtaaccttatattaagtcactgggtttttatatggagttaccatgaaagtagtattatacaggcgtttgagtaaagaagataaaaccaaaaaccaacatggt

SEQ ID NO: 38063 - DNA, 260 bp, Unknown
  Description of Unknown: RightRegion for integrase A631 sequence
ttgaactaatattattatctctgtggttcaacaccaaagtattggatagtattaagaggcaatggacatttgagaatgtcactatggtttatattataggttgggtaattttcctagctggaaattattaaaataaatattgacattataaacccagtgacttaatataaggttactgggttttcttatatggagttaccatgaaagtagtattatacagacgtttgagtaaagaagataaaaccaaaaaccaacatggt

SEQ ID NO: 38064 - DNA, 260 bp, Unknown
  Description of Unknown: RightRegion for integrase A632 sequence
aagtttgaaaggaaatacggaatgggtccccgacgttatcaacaacacgcacgtctttaagttatttcctaactcaacgtacattatatgtgagcggtacaagattaggtttaactagactagcgtgtccgaaaagaaaaggtgtatgccgcgagtccgacctaggaagttatcccttcattacaaccgctcacaactcttttggttcagaggaagtcctccttgtcaacatcgatgtcactaaagccattctctgaacc

SEQ ID NO: 38065 - DNA, 260 bp, Unknown
  Description of Unknown: RightRegion for integrase A633 sequence
ttacggtaaaacctatcgtgaatggagaaaggatactaggatgaaattagctaaggagttactccacaaaaatccaagtattaagattacagacttggcgactactgtaggttcttgtagtgcgacctatttacggaagcaataccaagaagtctacggggttaatatcgttgaactccgggaaactttgagaggcgcttgtgtctgataagaattccagagagttcaagaagctcaaaaatgcggctaagaaatattgt

SEQ ID NO: 38066 - DNA, 260 bp, Unknown
  Description of Unknown: RightRegion for integrase A634 sequence
ttatggtaaaccctatcgtgaatggagaaaggatactaggatgaaattagctaaggagttactccacaaaaatccaagtattaaaatcactgacctggcgactaccgtaggttcttgtagtgctacttatttacgtaagcaatatcaggaagtctatggagttaacattgtcgaacttcgggaaactctgagaggcgttcgtgtttgataagaaatccagagaacttaagaagctcaaagacgcggctaagaaatattgc

SEQ ID NO: 38067 - DNA, 260 bp, Unknown
  Description of Unknown: RightRegion for integrase A635 sequence
aatcctcttagacattaagtttaagaggatttatttttatgaaacaatacaaaattcgacctagtttctttggcttattctacaaagttactttgtttgctgataattatgaccgacatactatatcttttcatttaactaggcagtctgcggaaaatcaggtaaagtggctgaagaaaattaattattaaggttttattatgaaagtgattatttacaaacgtctttccaaggaagaccgtactaaaacacaacacggt

SEQ ID NO: 38068 - DNA, 260 bp, Unknown
  Description of Unknown: RightRegion for integrase A636 sequence
accaataaatcaaaatatatatcacgcgcatcaacggatgcttttccaaagcatggaaaaatacaagacagtgttttgttactattattttgcatataaaatgacaaacaaaaaatatatttacataagagcgcaaaaaaattgaaccattaaattcttatcaatataaatattatatttattcgagaatcttatataatatggtggcacttaatgacgaatcaaaaaatggatatatttattgtagacaaagcaaaaag

SEQ ID NO: 38069 - DNA, 260 bp, Unknown
  Description of Unknown: RightRegion for integrase A637 sequence
ttcgtgcgccgcggggacatgtcctcgcggctcctgcagcaccacatggagatggtgcgcgctcgtctcccgccgtacgacctggaggggctggtggtgtgctgcaacgtcgacggcggcgagcgggcgttcgcgctctcgccgcataactgaaaagatatcatcggaacgtgaaatcgcggccagaggccggcgcacccatgacggcggcgctcatttactgccggatctccaccgaccgccagacgacgctgctggcc

SEQ ID NO: 38070 - DNA, 260 bp, Unknown
  Description of Unknown: RightRegion for integrase A638 sequence
attttgattttagtggtggtcaatgattaaaaaattaattttgattttagtggtggtcaatgattaaaaaattaattttgattttagtggtggtcaataattaaaaaattgattttttaattaacatagcagttcattttagttgaaccataagtattcctcaatcaatcgtaattattgttgtgttggaaattcaacttatgaataacatttatcattcaaatgatactgatatagtattagcggctgatgcattggtt

SEQ ID NO: 38071 - DNA, 260 bp, Unknown
  Description of Unknown: RightRegion for integrase A639 sequence
cgcgcggacatgtcgacgcgcctgctgcagcagcacatggaccggttgcgcgcccaccccccgccgtacgacctggaggggctggtggtctgctgcaacagcggcggcggcgagaaggcgttcgcgatctcgccgcataactgaaaagatatcatcggaacctgaaatcgcggccagaggccggcgcacgccgcttccccatgacggcggcgctcatctactgccggatttccaccgaccgccagaccacgctgctggcc

SEQ ID NO: 38072 - DNA, 260 bp, Unknown
  Description of Unknown: RightRegion for integrase A640 sequence
tgtgatcgcaactcgaatcataaagattcgtccgacaaaatcacagaaacaacagattgacaagattgcaggagttgttcgattttgctataacgcatcgatcaatgaaataaacaaaatgcgttgtcatgaaatttcatggccatccgggaaactcgatcaacatctgagaaacaaattttcgatcgggaaacacaatgatatcgaacaatacatttcgattcatggaaataacatcgaacccgaacagatcatcgaga

SEQ ID NO: 38073 - DNA, 260 bp, Unknown
  Description of Unknown: RightRegion for integrase A641 sequence
tccgctcgtggtaaggtgttgagtcaaggtatgatcagtaaactcttaaaagaaatttagataaaattgaaaaaattattatcaggactacctagaggaaaacttagaacaagttctaaaatcgtatctgggatctgcttacgaaaattagtgcaaattacataatttattatccgagtaccaattacgattttcgtttttacgataagaatcaacaacttatactagttcaataatttatttatgagatttcgtttcca

SEQ ID NO: 38074 - DNA, 260 bp, Unknown
  Description of Unknown: RightRegion for integrase A642 sequence
aaatttcgtctctttaatttttcttcttttttcttcttctttttctgtctcctattaaggatttttttagaagacattctatatatgtataatatatattttttttttattttttatatttttttataagtaaaaataaaaatcatcaaaaaatataaaaaataatatatataaaactatattatatataccattctataatgaaaaaaaagaataataaaaacgctgataacgaggtaaataaaaagaaagaagtaggt

SEQ ID NO: 38075 - DNA, 260 bp, Unknown
  Description of Unknown: RightRegion for integrase A643 sequence
tgaacgaagcaaaaagaatgatgcttgttagttttattagaaacaaatggaaaaagagatacagacagtggataatttgtaaaagaatgcatcggtatgttgatcctgactgctccaaaattatcgcaggctatttgtaaataaaaaaattgataaatacattaacgaaacaataataatcaatacatagaaacaaactaatgaaagcatatatctattgtcgattgagtggacgtcgaggatcggttaattctcaaacc

SEQ ID NO: 38076 - DNA, 260 bp, Unknown
  Description of Unknown: RightRegion for integrase A644 sequence
ttgagttggtgcaataataaataattcatgttttcacttttatgatttttagcatggtgttgatcgctttgggcccgcgataaaccaaaccatacaaaatcgactcgtgggatgaagccgcagaatcgaagtgactttcgagctggttgcgtttaaatgctccattcttgtttgtccaaaatcgacctcaaatcgaccccatgtgtctcactatcatccacctccacatttcaatatggactctatcatcgagctgggat

SEQ ID NO: 38077 - DNA, 260 bp, Unknown
  Description of Unknown: RightRegion for integrase A645 sequence
tcagctcgtggtaaggcgttaagtcaaggtatgatcagtaaactgttaaaggagttgtagtaagctcttgaaggaaatttaaataaactgacggatttattatcagagttactttcaagaaaaattaggacgaattctaaaaatggtatatgaggtttgtttatggaaattagtgcaagttgtcggatttattatccaagtaacaaagcactttttcgttttcctgataagaatcaactacttagacgaacgatgatttt

SEQ ID NO: 38078 - DNA, 260 bp, Unknown
  Description of Unknown: RightRegion for integrase A646 sequence
tcggctcgtggtaaggtgttgagtcaaggtatgatcagtaaactcttaaaagagttgtagtaaactgttgaaagaaatttagctaaactgttaagattattatggaggtggtatgcaagtagtacagtatagtataaaacaatgtggcatagacaagttgacatgcagtaacaaagataccaaattcatggataaaggtttttacggaaaactgacaccgctttgtacacttaataacggaaaccaagatggtattctgt

SEQ ID NO: 38079 - DNA, 260 bp, Unknown
  Description of Unknown: RightRegion for integrase A647 sequence
tcagctcgtggtaaggtgttgagtcaaggtatgatcagtaaattactcaaggaaatttaggtaaaccgttaaaattattatcaagattacttccaagaaaaattagtgcaaattgaaaaaattacatatgagatttgtttatggaaattccagtgcaaattacgtaatttatttgagcgatccctttcgccaaatggaaaaattatttctgagattacgtttccaaaatttgtagagaattctaaaattatttatcagaa

SEQ ID NO: 38080 - DNA, 260 bp, Unknown
  Description of Unknown: RightRegion for integrase A648 sequence
tgccgagtatcacgagcgatgcgaggcatacgatcggctcgtctgtaccggcccgatcattcacggctcgatcatgccggcgacggctcacgagctgcgccttatcggccgcaatgcgcgcgccgtattgcgcgagctggccgagcgcgcggcaatgctcggctattcatcaaggcaactcacgaaggcgatacaagaaaatgcgtgatccactcgacaagggcacactcgatatcgtcaccggcggcatgcgcatcggc

SEQ ID NO: 38081 - DNA, 260 bp, Unknown
  Description of Unknown: RightRegion for integrase A649 sequence
caaatatggttccaaaataaacgttgtaaagacagaaaaaatttggaaaaaaataattagacatgatttggtattttaaattgtacaattaatttaattgtgcaatttaattctaatcttttatgagtatgtaattacatactcataaaaagattattatcatacagcatcattatcattaatgaaagtatattcagttgaatgtttagtccatttcattgtcgttgaatttgaataaacaatagtcgttttttcatgtt

SEQ ID NO: 38082 - DNA, 260 bp, Unknown
  Description of Unknown: RightRegion for integrase A650 sequence
ggtggtaaatgggatgctaaaactgtttctcgtttgtgtgccagactgaacattaaataggagaggatatgaaacaagaaaatgaatctgtagatcacttaatcatgctgtcagccctttttgccggatgggacgtattttttgaaaatttgttcaattcttctacagatggttccgattttatgcgccagtttaaacgacgaactgttgaggactatgctttctattcaggtcggattgaaaaaggttacgaagataca

SEQ ID NO: 38083 - DNA, 260 bp, Unknown
  Description of Unknown: RightRegion for integrase A651 sequence
gtgcatagagaaaccgtaggagcaataaagcgaggaatatcgtggaaacacgttaaataaaattatatattactaggaggaaaacatattatgtcattcgcagatttaatcaaacaagcaaaagcagaggtagaacaacaaacaggcggggataacagccgtacagtttacccgaaagctaagcacccgacattattctttggtaaagatacaccggaattactatttcaactattaccttcagctgacttaaacagcac

SEQ ID NO: 38084 - DNA, 260 bp, Unknown
  Description of Unknown: RightRegion for integrase A652 sequence
tggtatccttctactgtaaggaattatgtaaatagatgttcttctaatgttcatctgtaatagaaacaatatgtgtctaaaagataaactatacaaggtcatttagacaccaattaaaaaggagtaaagatgatacagttgattaaaaagtataaagagcaaattaagtttgctgccgagtgcataacatttcttttaatgttagttgcaatgtattttttcactatagttatgtgtgcgttgtcagataagtgtgctgc

SEQ ID NO: 38085 - DNA, 260 bp, Unknown
  Description of Unknown: RightRegion for integrase A653 sequence
tggtatccttctactgtaaggaattatgtaaatagatgttctgttaatgttcatctgtaatagaaacaatatgtgtctaaaagataaactatacaaggtcatttagacaccaattaaaaaggagtaaagatgatacagttgattaaaaagtataaagagcaaattaagtttgctgccgagtgcataacatttcttttgatgttagttgcaatgtattttttcactatagttatgtgtgcgttgtcagataagtgtgctgc

SEQ ID NO: 38086 - DNA, 260 bp, Unknown
  Description of Unknown: RightRegion for integrase A654 sequence
atgtttatgcggaatccgaagaacacgcaaaagctattggttccgtgcttctttctagaatagcaggtgaagaaattcctgtagaggctatctttgcagaagttgaccctagtattcaagaggatgatattaccactacttaactgttgactttaacattaaggtagtgcatacttcctgtaacagaacaggagggtattatgaagtttgtactatatcatcgactttctaagaagaaacaacaaggcaaccagtatggt

SEQ ID NO: 38087 - DNA, 260 bp, Unknown
  Description of Unknown: RightRegion for integrase A655 sequence
atgtttatgcggaatccgaagaacacgcaaaagctattggttcagtgcttctttctagaatagcaggtgaagaaattcctgtagaggctatctttgcagaagttgaccctggtattcaagaagatgatattaccactacttaactgttgactttaacatcgaggtagtgcatacttcctgtaacagaacaggagggtattatgaagtttgtactgtatcatcgactttctaagaagaaacaacaaggcaaccagtatggt

SEQ ID NO: 38088 - DNA, 260 bp, Unknown
  Description of Unknown: RightRegion for integrase A656 sequence
tgctatttatacccaatatatggtaaaatataaaagagaattaacttttgttatatctaactagttagaataatataacataatatcatataatttaccaaaaaatattgaaaatgtggacaaggagtgataaactataaataaaaacattgacaaacatagacaatagtggtaatatgtatacataaggagttgaaattatgaatacatataaaccaaaagattttgcagaaatgataggagtatcagtaaaaacacta

SEQ ID NO: 38089 - DNA, 260 bp, Unknown
  Description of Unknown: RightRegion for integrase A657 sequence
ctgttgttgcgattgaaaaagacaaacttgtgggcgtttatcattcagcctgcgaggctggcagaagaaatggaatatgtgtacagaatatagttagctgttgttccggaaagcgtaaacatgctggtgggtatcaatggttttgggaaaacgataatacttggtgtgatttagttaacatggagaaataaatatatattatgatttacggatacattagagtaagtagtgataaacaaactgtagaaaaccaacgtttc

SEQ ID NO: 38090 - DNA, 260 bp, Unknown
  Description of Unknown: RightRegion for integrase A658 sequence
ctcttagatgaaatgcaagaagtaataactaacaatgtcagctatctcaatcacgcataaaatcgctttaaagcctaataacaagcatactacctactttaaaaaagcttttgggtgtgctaggttcgcttataattgggggttagctaaatggaaagaaaactaccaactaggtattaaaactagccatctacaacttaaaaaagagtttaacgctcttaaaaaatcgcaatttaatttcgtttatgaagtaactaaat

SEQ ID NO: 38091 - DNA, 260 bp, Unknown
  Description of Unknown: RightRegion for integrase A659 sequence
ctcttagatgaaatgcaagaagtaataactaacaatgtcagctatctcaatcacgcataaaatagctttaaagcctaacaacaagcatatcacttattttaaaaaagcttttgggtgcgctaggttagcttataattggggattagccaaatggaaagaaaactatcaactaggcattagaactaaccatctacagcttaaaaaagaatttaacgctcttaaaaaatcgcaatttaatttcgtttatgaagtaactaaat

SEQ ID NO: 38092 - DNA, 260 bp, Unknown
  Description of Unknown: RightRegion for integrase A660 sequence
tataaggacagatcttggtaccctacaacagttaaaaatgtccttgaaaggggttgctaatgaacagaatatggactaaatatataaacaagatgaacataaaagaaacattattgtttatagcagagggtgtagctttcttgttatgcttggctgctatctattttattgtcatgtttggatgcgtgatggttgatagttgttactattactatgttccaggagggggatcttgatgggagatagtggtagaaaaacat

SEQ ID NO: 38093 - DNA, 260 bp, Unknown
  Description of Unknown: RightRegion for integrase A661 sequence
ctgcacgagcaccagcgcggccacgtcgtcgacatcgaggagggcgcgctcgatgcgtagcccggaggacgtgcaccgcgagctattgcagtcgcgaggtctcgttccgctgacgctgttcgacccgcacaacctcgatgactgctacgagcccaccggtctcgacgagtttcaccccaacaccacgaggaacccctgatgctgcccgattgcgcgctgtgcggctgcccgcaccacgtaggccaatgcgcctgcacctg

SEQ ID NO: 38094 - DNA, 260 bp, Unknown
  Description of Unknown: RightRegion for integrase A662 sequence
ccttgttttttacaaaaacacgtaatgtaactcgcgccatacacaaatgtcagacagaaccagacaaacagacagaaacagaaggctaggaactgttcaacaaatccctgaggatacctgagggtttcttaagagacctgagtttttacggacaatttgatgctcgtaaaaattacataattttaatacttcgtagcactatggatggttacatctccggctcaaaagtcaaagaactcctcaacgtcagcgactggacg

SEQ ID NO: 38095 - DNA, 66 bp, Unknown
  Description of Unknown: RightRegion for integrase A663 sequence
aatacaattagctatatggcaggctatattgttaatgatgggataaagcaagaagcataagactaa

SEQ ID NO: 38096 - DNA, 260 bp, Unknown
  Description of Unknown: RightRegion for integrase A664 sequence
agtcgcaaaaataagaaacttttagataacgtagctaaagctgtgcaagaatcttcctaaatatgttgacatggggtagatttgggtatatatttaagaagtcaccaaaacattgtgaggtcgaaacagtgctgctttcctttaaaacaagtctaatcccaaataaaaaacaggtaactgcttttcgtaaagcctctggtgttgctagacacgcctataactgggctaacgctcaaatacaagatgctctagctaataaa

SEQ ID NO: 38097 - DNA, 260 bp, Unknown
  Description of Unknown: RightRegion for integrase A665 sequence
aaagatgctgaagaaagtattcaaaaaagcaaaagaagaaatataaatagatataaatagctataaatagatataaagaaaggagtttagaatgttatctagaaagataagaattgatagctttatctctgataaagaaaaagaagaaatttatcaatattctaaatctctttctactatctataatgaatgtctagatctccttaaagagaatttgaattttaaagatctatctaaaatcacaaaaggtagatcgaaag

SEQ ID NO: 38098 - DNA, 260 bp, Unknown
  Description of Unknown: RightRegion for integrase A666 sequence
atctctagagatgtagatattcctagtagtactctacatgatttacttaagaatctctaagtagagtccccaccataagtaagacactatttctaaagttttaattattaatttttctctttgttgaaactctatttagaggataactattaactatttacagttgttctctctagagtttagcgctatttttaggagggaagtttttgtcttaaactcaagacagactccaccccgaggaacagctaacgacctcacga

SEQ ID NO: 38099 - DNA, 260 bp, Unknown
  Description of Unknown: RightRegion for integrase A667 sequence
ttgtgattggtatataaaaaaatatttttctgaaccgggacaaataaattttaaggcaatattttcaaaacatgatgtaaaatgttctaaatgtgaacatatagaacatgttgatggtatttttgaaggtattttatatgaagatataaaaaaaattgcggaaattaatgaaaagaaaaaatcaaggcgaaataataaatatgattaatttaaattttcttggaggaaaacaaactgcgaaattacttggtgttcatcaa

SEQ ID NO: 38100 - DNA, 260 bp, Unknown
  Description of Unknown: RightRegion for integrase A668 sequence
agaagtcacaaaaacaagaaaattatagaggagttgaaagaagttgctgttcggctttaaaactgagttaaaaatcaataaccatcagcgtacccaactacttcaacattgtggtgttgctcgtcatgcttggaattggggattagctcttaccaaacagatattagatcacaataagttaaatcctaattccaaaataaaatttcctactgctattgatttacataaatggttagtagcattagtaaaaagtgaaaatc

SEQ ID NO: 38101 - DNA, 260 bp, Unknown; identical to SEQ ID NO: 38100
  Description of Unknown: RightRegion for integrase A669 sequence

SEQ ID NO: 38102 - DNA, 260 bp, Unknown
  Description of Unknown: RightRegion for integrase A670 sequence
agaagtcacaaaaacaagaaaattatagaggagttgaaagaagttgctgatcggctttaaaactgagttaaaaatcaataaccatcagcgtacccaactacttcaacattgtggtgttgctcgtcatgcttggaattggggattagctcttaccaaacagatattagatcacaataagttaaatcctaattccaaaataaaatttcctactgctattgatttacataaatggttagtagcattagtaaaaagtgaaaatc

SEQ ID NO: 38103 - DNA, 60 bp, Unknown
  Description of Unknown: RightRegion for integrase A671 sequence
agattgtgtaacatgagtcgtacaactatatataagtatattaaattgttagaggactag

SEQ ID NO: 38104 - DNA, 260 bp, Unknown
  Description of Unknown: RightRegion for integrase A672 sequence
aatgtttttactgcaaagatgaatggactaagaaaatataaaaaatctaaatatttataaaaagcttatgttaatgttatttttataaagaaatataaattttttattaactagttgtttcccatatcatttttatattatcattaatttataaatatttcaatattttataaattatctaatttattttaattatgaaaattgagatagttaagaatataatatgtcatattgcaggaattgacaaagaattacatcaa

SEQ ID NO: 38105 - DNA, 260 bp, Unknown
  Description of Unknown: RightRegion for integrase A673 sequence
ctgttgaaaaaactatccgagatattcttatggaacgggccaggggtaagtgacataacttatatcgagcatcttgccattaactggcaatatgtattaatgcttaagatcaaacttagttattatagggttaaatacagaaaccaaaaacctaactaatactattcaaaattactcatgacttatgctataatcgttctatgagtaagttgaccatatcagaagcggctaaattaaaaggtgtaagcgtatcgacatta

SEQ ID NO: 38106 - DNA, 260 bp, Unknown
  Description of Unknown: RightRegion for integrase A674 sequence
acgttgggggtttcgcgtgcgacgctgtaccggaccctcgccgaggacggcagcaagtgaccggcagccagttctgcgaccagttggttgccgagctgcgggcgcgtagctggcggatagggtgattggcatgggcgtcccaacacacgtgatggtgttttccagcggcaccgcatcgacgaagggtggcggttctagtcggttgcagttcgtcagtccgctacgccggttgaatggtggagagcgctggttcttgctgt

SEQ ID NO: 38107 - DNA, 260 bp, Unknown
  Description of Unknown: RightRegion for integrase A675 sequence
ttgagaaaatataaaacattaataaagaaagaaataatggataaacaacctaaaaaatgaccatataacagaatatatcaataattctttccgaaggtacgaaattatataactcgtttaagatcaataagaataagaaaatattaacatagcttcgcagttgggatattgcttatggttgtatttggaaaaccgaagcaataaaagagttaaatgaaatatagtattataaattatgttgttagtgttagactatgatg

SEQ ID NO: 38108 - DNA, 260 bp, Unknown
  Description of Unknown: RightRegion for integrase A676 sequence
aagaaaaataccgcatctcttttgagatgaagatatagtctacgctcatatgaaagtatgagaggtctactcgtgagagaaagactgctataggtgttgcgacttatagtgaataagaaaaatatatacaaatataaaaaaatattgacatatctctctaaaaagtgtaatatataattatactaaagggaggtgagtacatggaattaatgtccattggtaaatttgctaaacgtgtaggcgttaatgttgttactctg

SEQ ID NO: 38109 - DNA, 260 bp, Unknown
  Description of Unknown: RightRegion for integrase A677 sequence
gcgccggatgggacatggcgcgacgaggaatacatcaggagacgagagcgtgaacagtaatgctgcataccgtagccgatcttctcggggcgctgtccatcgtcatttttgtggccacgcttttcgcaatcgttagactgattgtgaaagctcgtgagggtcacaagtaagacgcttctttctcactcaggcgtaatagcctctatgcgcaaccatgactgtccccacggggcctttacacacacgcgcccacgatctga

SEQ ID NO: 38110 - DNA, 260 bp, Unknown
  Description of Unknown: RightRegion for integrase A678 sequence
gccgcctacatgcgcacgatcaccgatatcgcgcgaccgagggattctcgagcgacctgatgcgcaatcagacgatctgaccggaagaagcaagccccgcagtcgtttccaacgtgcggggcttttttagggcgccgatagggcgcagcagcatcactcagaaagaatccagcttaggctttcatggcggtctccggtgacggttgatcaggcgttcacacgatgaaccgccattgtacatcacgaccgccagtcagaga

SEQ ID NO: 38111 - DNA, 260 bp, Unknown
  Description of Unknown: RightRegion for integrase A679 sequence
acaacaggattgaaaaagcacaagcaagcattaatagatgaattaaccaataaaaaatgataatgctaacgcaatgcataattcgcaaaaaagaattccaattttcatgtcacattgaatttttagaattttttgaatttgcccctattttcgtttttttaaacgctcaaagctatttacaaataatgaacgataaatacgataataacagttgcaagacgtcaataatagatgcaacacaataatattttttacaacaa

SEQ ID NO: 38112 - DNA, 260 bp, Unknown
  Description of Unknown: RightRegion for integrase A680 sequence
cgtaagtacaaaaaaaaattaactgatacaattaaaaatggtaagaataatataaaataaatgatagtatctcgttatattgaatatataacgaaatataacagtttttggttgccgctctactataaactaaaaagtaaatatatcatgtattaaatcaatttgactagctataaataataaatagttattctatatgcaatataattaaacaataatttcatttgatattttgttatactaaaatcaaataatgataa

SEQ ID NO: 38113 - DNA, 260 bp, Unknown
  Description of Unknown: RightRegion for integrase A681 sequence
aatagacgtaaaagaaaactgcatattgttaataaagatcttgaattatttgatgaataaatacacttaaagatttgtttattatatatatttatataatgagctcttcagtaaaacttaaaaccattacatttaatataacagataagcatacacgaaaaatatttaatggaatgacaaaaatatcaaaaaacatatacaatacgactatttttaatattactatatttaacaaatataaacaaactatttttaaaaaa

SEQ ID NO: 38114 - DNA, 88 bp, Unknown
  Description of Unknown: RightRegion for integrase A682 sequence
agaatgacagggattagtaagagtacattacaaagagcaaagcgaaaacaagaagactaggtacttagtctttttttattgaaaggag

SEQ ID NO: 38115 - DNA, 260 bp, Unknown
  Description of Unknown: RightRegion for integrase A683 sequence
ttgcaaataatgaatgtatttacagcaaaaatgaatggaatgagaaaatataaatcataaacaacaaaattattttccaaaaacttcaaacgaattgtaaaaatttataattataaacttttataaatattttgtgtactagtatcaccccagtcgggtttgttcgcgataatattaataagttgtgccattaatttttttattaataatcaatttataccaaaaccaatgttagtgaatttaattcaattttaaatttt

SEQ ID NO: 38116 - DNA, 260 bp, Unknown
  Description of Unknown: RightRegion for integrase A684 sequence
caccccgcgaaacgaacgcatatagaaaacgacgatcgaatcaatcaaatcgatcggtaatacagatcgattatgtctcaataaccacactcaacccatgatgttttttaagatagtggcgaattgatgcaaaggaggtgagatgaaatcaattcgctgtaaaaactgcaacaaactgttatttaaggcggattcctttgatcacattgaaatcaggtgtccgcgttgcaaacgtcacatcataatgctgaatgcctgcg

SEQ ID NO: 38117 - DNA, 260 bp, Unknown
  Description of Unknown: RightRegion for integrase A685 sequence
ctgcacgagcaccagcgggggcacgtcgtcgacgtcgaggagggcgcgctcgatgcgtagcccggaggacgtgcaccgcgagctattgcagtcgcgaggtctcgttccgctgacgctgttcgacccgcacaacctcgatgactgctacgagcccaccggtctcgacgagtttcaccccaacaccacgaggaacccctgatgctgcccgattgcgcgctgtgcggctgcccgcaccacgtaggccaatgcgcctgcacctg

SEQ ID NO: 38118 - DNA, 260 bp, Unknown
  Description of Unknown: RightRegion for integrase A686 sequence
ttcccctcatcagcgacaaagaataaattgtgtcatcccttaaccaaccgggacaaatagcctgacatctccggcacaactgaaaataccactcacccattaaccacggagttaaacggatgagtgactatcatcacggcgtgcaggtgctggagattaacgacggcacccgcgtcatttccaccgtatccactgccattgtcggcatggtctgcacggccagcgatgcggatgcggaaaccttccccctcaataaacct

SEQ ID NO: 38119 - DNA, 260 bp, Unknown
  Description of Unknown: RightRegion for integrase A687 sequence
tgttccttccaatacttcgtgacgttatttaaacaacaattccgtacacatcctcaaacgtacgccaattcttttaagagtaagtagttatggatacccaagaaaccattttaaaaatcgaagccgcagtcaaagaactatttgcagaaagcaaagcctccgctaagatttacgcacggctcaatatgagtgggccaagcatgggacgtttcctagagaaacataaccacccatcggttaaggagatgttagtagaagct

SEQ ID NO: 38120 - DNA, 260 bp, Unknown
  Description of Unknown: RightRegion for integrase A688 sequence
cgatcaaagacaaggacctgcgcgacagaatcggcaacgccgtttcttttagccgtccgctcagggccatgaacaaggtgttcagcccggcacgctgaacgctgccctagcggatgctagggagggttcaaaaaggaccctctccgccatacgctagggcaacgtacaatccccggaaacaaacgtttccacgggggaatatgctgtacggctacgcccgggtctcgacgcaagaacaagagacccacgctcaaaccgac

SEQ ID NO: 38121 - DNA, 260 bp, Unknown
  Description of Unknown: RightRegion for integrase A689 sequence
gcaaaagacccggagcaaaaaagcttctggcagcggtacaccaatgtttttctgaagcagcttagggccatgagccagacggcaaggatggcctcctaacccgttgccctaagcacgggagggggttcaaaaaggaccctctccgccattgcttagggcaacccgtacaatccctgaaaacaacaatcttcagggggcctatgttgtacggttacgcccgtgtctcaacgcaagaacaagagacgcacgcacaaaccgac

SEQ ID NO: 38122 - DNA, 260 bp, Unknown
  Description of Unknown: RightRegion for integrase A690 sequence
agccgaagaggcgcgccgcatgggcatctacgagaacgtgaagaaggtttttcggaacctgcttagggccaagaaacagacggtccggatggcatcctgacccgtcgccctaagcacgggaggagttcgaaaaggaccctctccgccattgcttagggcagccagtacaatcccaagaaaaaacgttttcgaggggttgcatgctatacggctatgcccgggtctctacgcaggaacaagagacccacgcacaaaccgac

SEQ ID NO: 38123 - DNA, 260 bp, Unknown
  Description of Unknown: RightRegion for integrase A691 sequence
cgagtttatggattaagaaaatataagaaaaaggttggtgatgattttaaatgcaaataacctataaagttgaattaaaactaaataagactcaaaagcaacagattaattcttatatcggtgttagtcgttgggtttataataagtttcttgaaataaatagtaaaaactaccaagaaacgcatgattccaaatcctatatgagtgcttatactttttctacttggtttaataatcagtatttaaaggataatcctagt

SEQ ID NO: 38124 - DNA, 260 bp, Unknown
  Description of Unknown: RightRegion for integrase A692 sequence
cgttaccaccccgcaggagaatcaagcggaacaatagagaagagtcagaaaacaaaataaccgctaatctgaccattagcggtttttgtgttaaatcagaacagccctttaactgaactggccgcgctgttaagggatgatgtcaccttatctttgaagccggacagcatatcgctgaacgatgaggattgcaggcgctcccgcaaatcctcatcacagcgttcaagggtcagtgaaaattctatctttttcgccttacc

SEQ ID NO: 38125 - DNA, 260 bp, Unknown
  Description of Unknown: RightRegion for integrase A693 sequence
actttgtatcgtattatcaacgtaaccactgaggatcatcatggcaacgcttgtttttgatacccatgcttttgttaaaaaactgaccaccgcaggaatgccggaagctcaggcggaaatcctcgcgcaggaacaggccaatctgatagaaaaccgcttggctaccaaggttgatatcacgacgttggaaaaaaatattgagatgaaatttgaagcgaaaatagaaagcgttaaatccgacatcatcaaatgggttgccg

SEQ ID NO: 38126 - DNA, 260 bp, Unknown
  Description of Unknown: RightRegion for integrase A694 sequence
cactaaaacaaaccattgacgaatgataattaggatttttttgatattctctaatatcaaaccacgattcagtttcaatttcattataatgatcggataattttggtatccatttttcttttttcttttttttcatattattttatttatattattaaaactttatataaacatttataaatatataaaaaatataacaaatgagtaaatacgtttcaggtaaaaaagcaagtgaaatattaaaagtgcatcaaagaaca

SEQ ID NO: 38127 - DNA, 260 bp, Unknown
  Description of Unknown: RightRegion for integrase A695 sequence
tagttaaaaaagagctacctacgagcataattctagaaaaattgttctgacttcttactctagaggggacgaaggtttgtagtttgttatcacaactgtgatttcagaaaagaggctccatgcacttcagatcgaagccgttgttagcagtttcagataaaccgtaaagtttatattatttcgtcataaaatttcatacaatgctaagacctaaagaagtgtgccaaagactaggaatttcatacgcaacactcagagaa

SEQ ID NO: 38128 - DNA, 260 bp, Unknown
  Description of Unknown: RightRegion for integrase A696 sequence
tatggaaaggctaaggcgtgtgtccaacacgtaagttacatgcaccctctcttactaggggtgccgggggttaaggtaccctatggggtaccgatgtacccccatgggtgccggggtcagcccggcactttggacagccgtcgtcaacagtttccgataaaccgtgaagtttatatactttgtatgtaagtttaactacaatgctgaaacctaaggaagtgtgccaaaaactaggaatatcataccgcacactacagagc

SEQ ID NO: 38129 - DNA, 260 bp, Unknown
  Description of Unknown: RightRegion for integrase A697 sequence
ctgtataaaaaacaccccgcgaaacgagcgcatatagaaaacgacgatcgaatcaattaaatcgatcggtaatacagatcgattatgccccaataaccacactcaacccatgatgttttttaagatagtggcgaattgatgcaaaggaggtgagatgaaatcaattcgctgtaaaaactgcaacaaactgttatttaaggcggattcctttgatcacattgaaatcaggtgtccgcgttgcaaacgtcacatcataatgc

SEQ ID NO: 38130 - DNA, 260 bp, Unknown
  Description of Unknown: RightRegion for integrase A698 sequence
ttgtataaaaaacaccccgccaaacgaacgtgcatagaaagtaacgctcaaaccaattgaatcggtcggcaacacagattgattgtgccccaatagccacactcaacccacgatgtttttttcgatagtggcgaattgatgtaaaggaggtgagatgaaatcaattcgctgtaagacctcattttccaacatcacaaccaagtaacgctgctgcccgcaaaatgatctaacgcccatacgaccagggtgtcacctctgga

SEQ ID NO: 38131 - DNA, 260 bp, Unknown
  Description of Unknown: RightRegion for integrase A699 sequence
taaaacaaaatcagtaaagttttccaagaaagtgaaggataaacttaaaaatatacatattaacgtaacacaagaacaaatacatacactcaatggaattaaaatataataaattaaattaagccgcctgtctaggtggttttcttttgtatttagggtataatataaatatatattatgaataggggttgaattataaaatgagtgataaaagtaaaagaacatttaatcgttggacttcttcagaagaagaactactt

SEQ ID NO: 38132 - DNA, 260 bp, Unknown
  Description of Unknown: RightRegion for integrase A700 sequence
aataagcagccagaatggtataaaaattcaataatcgttattatttatttggtggagcttactcttagagctgcttttaagttgtttataaatgtaagtgctaattttcaaagattggataatcatacatttacaatatgtaattataaatgataatatgtaattgtcaattaccatcatttaattaaggagatttttatatgccacatcaaattttgacatccgaaaaaattgttcaggccggcgtgaacataatcgaa

SEQ ID NO: 38133 - DNA, 260 bp, Unknown
  Description of Unknown: RightRegion for integrase A701 sequence
gtttatgattaacagctaaactaggtttccaaagtaaatcagaaaccttttcacattcgtcattccaaaacttaccatttgtagttttggccattacattattactaatattatgaaattatcttatatttaagtaactttttgactattatattaattgaacatatttaaagatatgtttcgaaaatatatttatcagaatgcctaaatatgttcgtcgtaaagaagtactggaagtattaaaagttcattatcaaact

SEQ ID NO: 38134 - DNA, 260 bp, Unknown
  Description of Unknown: RightRegion for integrase A702 sequence
gtttatgattgacaattagattaggtttccaaagtaaatcagaaaccttttcacattcatcattccaaaacttaccatttgtagttttggccattacattattactaatctcataaaattatcatatatttaagtaactttttgactattatattaattgaacatatttaaagatatgtttagaaaatatctttatcagaatgcctaaatatgttcgccgtaaggaagtacttgaagtgttaaaagttcattaccaaact

SEQ ID NO: 38135 - DNA, 260 bp, Unknown
  Description of Unknown: RightRegion for integrase A703 sequence
aatgtctatgtagccaaaataaatggaaaaataagtggtaaattaaaagcgaaaaagtaattacattaacaataaaatatatgaaaatacatacattttcatatattttaacgaaccgtcaataaagcatagtcataaattatctgataattatagaatgatttaatgattattacgtacaaactactgaggaattatttactagaccaagaaaaatatcacattacagtgaaaaataattatttagtcatatcagttcc

SEQ ID NO: 38136 - DNA, 260 bp, Unknown
  Description of Unknown: RightRegion for integrase A704 sequence
attgcgcaaaatgaagaattatttaagatgttacaaaaagagaaagggactaatagctaatattagtcctttttttatataaattggttattatgtaaaaaattgacaataatgtggatgagttttttaactattttgttaatttattatataatacatgtatacgcaaaggggtaaaaactacgaacgtagtataaattaatgtagggggagtttcgtttgtctaaaagatggacagcagaagaagataaattgttagc

SEQ ID NO: 38137 - DNA, 260 bp, Unknown
  Description of Unknown: RightRegion for integrase A705 sequence
gtttatgattgacaattagattaggtttccaaagtaaatcagaaatcttttcacattcatcattccaaaacttaccatttgtagttttggccattacattattactaatctcataaaattatcatgtatttaagtaactttttgactattatattaattgaacatatttaaagatatgtttataaaatatctttatcagaatgcctaaatatgttcgccgtaaggaagtacttgaagtgttaaaagttcattaccaaact

SEQ ID NO: 38138 - DNA, 260 bp, Unknown
  Description of Unknown: RightRegion for integrase A706 sequence
aatgtatatgtagccaaaataaatggaaaaataagtggtaaattaaaagcaaaaaagtaattacattaataataaaatatatgaaaatacatacattttcatatattttaacgaaccgccggtaaaagatcaaaatgacatctatcaataaatttttggacaccatatctatgtaacatgtataatacagtatcgatatcaccaattcttacgaaacacaaaatacaatcacaattaatttcagcgccattgtctattag

SEQ ID NO: 38139 - DNA, 260 bp, Unknown
  Description of Unknown: RightRegion for integrase A707 sequence
gatgtaatgaatgtatttacagcgagaagaaatggatcgagaaaatacagtaacaaatagtgagtaatttctttatgaatttataggtaaatttataaagaaatataaagaaattagtaactagtagagttccctctgtttcatagtttataatactgttttcatgttttagttcatcgatagctgtagatccaaccatatctttttgataaagatctacaccgtttgcaatcaaatctttaaatatgtcgagacattca

SEQ ID NO: 38140 - DNA, 260 bp, Unknown
  Description of Unknown: RightRegion for integrase A708 sequence
gatgtaatgaatgtatttatagcgagaagaaatggactaaaaaaatacagtaacaaatagtaagtaatttctttatgaatttataggtaaatttataaggaaatataaagaaattagtaactagtagacttcccaatattcactaattgttttattacccagactcaataaatactgtaaaatttcgatgttttttgattcaacaataagtttatctaaatcgtaatcaatatcgtaattttctatcaagtacttgacta

SEQ ID NO: 38141 - DNA, 260 bp, Unknown; identical to SEQ ID NO: 38139
  Description of Unknown: RightRegion for integrase A709 sequence

SEQ ID NO: 38142 - DNA, 60 bp, Unknown
  Description of Unknown: RightRegion for integrase A710 sequence
aaaatgacagggattagtaagagtacattgcaaagagcaaagcgaaaacaagaagactag

SEQ ID NO: 38143 - DNA, 260 bp, Unknown
  Description of Unknown: RightRegion for integrase A711 sequence
caaataatgaatgtatatgttgcaaaaataaatggaagaagaaaatataaaaataaataaaaatatatataaatcatacatttacatatattttatgagtccgtaaattatattaaaaatttaagaccaagtacatttcgtaaaaataatccaatgtttgaatcattaatattttttgataggaataatcattttaaataatatcattctattttttcaatatagttccaataataaggaaacatatgtttatacagttt

SEQ ID NO: 38144 - DNA, 260 bp, Unknown
  Description of Unknown: RightRegion for integrase A712 sequence
gcccgcgagttcaacatcagccgggaaaccctctaccagtacctccgcacggacgactgacacatgccgcgtcgcttgatcctctcggccacggagcgggacaccctgcttgcgctgccggaaagccaggatgacctgatccgctactacaccttcaacgactccgacctgtcgctgatccgccagcgacgcggcgacgccaaccgcctcggcttcgccgtgcagctctgcctgctgcgctaccccggttacgcgctggg

SEQ ID NO: 38145 - DNA, 260 bp, Unknown
  Description of Unknown: RightRegion for integrase A713 sequence
gcctggtaagcagagtttttgaaatgtaaggcctttgaataagacaaaaggctgcctcatcgctaactttgcaacagtgccccctaacctgatgtcagatgccatgtgtaaattgcgtcaggataggattgaattttgaatttattgacatatctcgttgaaggtcatagagtcttccctgacattttgcagggaattccatgactggacagcgcattgggtatatcagggtcagcaccttcgaccagaacccggaacgg

SEQ ID NO: 38146 - DNA, 260 bp, Unknown
  Description of Unknown: RightRegion for integrase A714 sequence
tatgatgtggctgtttccacgctttataagaagtttccggcgtcatcatttcaatcctaaaccttggtttaagagaactcggtaccagcggtgaaaagatccccctgttgagcacggctaacacatggagtgcacgccagactttcaacggcgggatcaccggggcgctgacagggaacgccgataccgcaacgaaattgaaaacagccagaaacattaatggcgtcaggttcgatggttctggtgacattaatatcaat

SEQ ID NO: 38147 - DNA, 260 bp, Unknown
  Description of Unknown: RightRegion for integrase A715 sequence
tatgatgtggctgtttccacgctttataagaagtttccggcgtcgtcatttcaatcctaaaccttggtttaagagaactcggtaccagcggtgaaaagatccccctgttgagcacggctaacacatggagtgcgcgccagactttcaacggagggatcaccggggcactgacagggaacgccgacaccgcgacgaaattgaaaacagcacgcactattggcggtgtggcatttgatggtactgcgaatattaatttacct

SEQ ID NO: 38148 - DNA, 74 bp, Unknown
  Description of Unknown: RightRegion for integrase A716 sequence
ttaaatataagtagaccaactttagataagttaataaaagaacatgaagaaaaagagtagctttaaaactactc

SEQ ID NO: 38149 - DNA, 260 bp, Unknown
  Description of Unknown: RightRegion for integrase A717 sequence
tagtgtattttgaaagaaaaaaatttgagatctaaagatgaaagaacttatcaagatcaacaagcaaaccttttttcttcatcaaatagaaataagctacgagtattgttactagttaccaacctaatagttgtttattgaaaagcaaggatgtttatactataatatagtacatgaagttgagtcattgggctaaaaagatgggaataagttatagaagagcatggcaaatgtataaggatggcaagctaccaaatgcg

SEQ ID NO: 38150 - DNA, 260 bp, Unknown
  Description of Unknown: RightRegion for integrase A718 sequence
tgcaaacattacgggaagcgtcgctatgccaaaaaaagcgatgatatcccgaaaagttgagatattcccgaacgttaaagatgccatggtcctcaagagatggtgcggactgtatcgtcggatgtataatctcgcgattgaaaagatgctcgacacaggtcgctggcattggaagggacacaaagttcttacgacatatgacaacatcccaaagaacgaaaaagtccgtttactcccgacgaacatccgtaaggaagcat

SEQ ID NO: 38151 - DNA, 260 bp, Unknown
  Description of Unknown: RightRegion for integrase A719 sequence
tatgatgtggctgtttccacgctttataagaagtttccggcatcatcatttcaatcctaaaccttggtttaagagaactcggtaccagtggtgaaaagatccccctgttgagtacggctaacacatggagtgcgcgccagactttcaatggcgggatcaccggggcgctgatagggaacgccgacaccgcgacgaaattgaaaacagccataaacattaatggcgtcaggttcgatggttcggctgacattaatatcaat

SEQ ID NO: 38152 - DNA, 260 bp, Unknown
  Description of Unknown: RightRegion for integrase A720 sequence
tttccagcttcctctgagtggtcatgccataccatttttgcccgacgccaaataccgaactcgttaacggataatctccagctggttgatagtttcccttcggctgatacttttccggtaaaccaaggtttccgggaatgcagccataaccggataaatccgtaataatcccgtcattacagcaaacatgagggaaaacaatggcggtcatcggctatatccgcgtgtcaacaactgaccaaaacagcgatttacagcga

SEQ ID NO: 38153 - DNA, 260 bp, Unknown
  Description of Unknown: RightRegion for integrase A721 sequence
ctttaataggacattttcgtctattatctataaaaagatcatacgacagtgttttctttttccgtttatttgtgtgcatatcatttcctaaaagctatatattatatattctttaagtcattattatattttgataaaaaaatattataatattttttataaagaaatataaaaagatattaaaaaaaatacaataaaaaatgccaaagtacttaggagggaaacaaacaagtgaaattttaggagtacatcaaagaaca

SEQ ID NO: 38154 - DNA, 260 bp, Unknown
  Description of Unknown: RightRegion for integrase A722 sequence
cagctcagtattgcccgctccacggtttataaaattcttgaagacgaaagggcctcgtgatacgcctatttttataggttaatgtcatgataataatggtttcttagacgtcaggtggcacttttcggggaaatgtgcgcggaacccctatttgtttatttttctaaatacattcaaatatgtatccgctcatgagacaataaccctggtaaatgcttcaataatattgaaaaaggaagagtatgagtattcaacatttt

SEQ ID NO: 38155 - DNA, 260 bp, Unknown
  Description of Unknown: RightRegion for integrase A723 sequence
ggaactaccgcccagtgtgttgttagtattcacgccgaaggaagatgtctgtggcagggttaacttcccgctcatctcatcgccagttttctggactgcgcccgcagcttgctttgctgtttcgcctaaaccgaggtttatgaaaatgcagaaaacggtcgtaaatggcatgatcccagccttttgcgagggggcctgttgtgcaaattggctatgtacgggtgtcaacaaatgaccagaatactgatttacagcgaaac

SEQ ID NO: 38156 - DNA, 260 bp, Unknown
  Description of Unknown: RightRegion for integrase A724 sequence
gaattgggagtaagtagaccaacattagatagattaataaagagccatgagagtaactaagaagagcaatatatatgcttaagttaattttagtggggcaaattcatagaattatgccctttaattatgtctgaaataattataaataactgtttttaagtataggggggtatccttctattttgaaaaaagtattttttatggaaaatgagttctggaaattttctagcaaaatttaaaaaccagagatacatcttgaa

SEQ ID NO: 38157 - DNA, 260 bp, Unknown
  Description of Unknown: RightRegion for integrase A725 sequence
ttgaacttggtaaatctgcacaaagacatgcatttaataaaccttcgttattacatgcaacatgatatttttcgtataaatattgtaatattttcaatgattcataacatgttttatgcgaaaatccagatgctatatgtccatgttcagaccattttttatataaaactatataaaaaaatgagaatataaattgtattatgcgatcaaaagatgttttaaaaattttaaatgtaacaagagttactcttacaacttat

SEQ ID NO: 38158 - DNA, 260 bp, Unknown
  Description of Unknown: RightRegion for integrase A726 sequence
taaaacaatattatgatgacaatggtgttgtagcaattacaggaattttatctaaagaagaaaatgcgcgacaatatcttcccgaaccatcaccaaatggtaaatatatttttacaaaaaataaatatgattcaatatatcatcatccgaccatttttttatataaaactatataaaaaaatgagaatataaattgtattatgcgatcaaaagatgttctaaaaattttaaatgtaacaagagttactcttacaacttat

SEQ ID NO: 38159 - DNA, 260 bp, Unknown
  Description of Unknown: RightRegion for integrase A727 sequence
ctttttgatgttagcatttccactctttacaagaaattccctgtaaatcagtcgcgttgaaagtggcgatattgtaccagtactgacacatcgtgaaatacgtgcgccgcacgcctggcaaccagaacataaggtatccctgtcaaccggagagactgccttatggctcaggattaccaccacggggtgcgcgttgttgaaatcaacgagggcacccgacctattaccacggtgagcactgccatcgtgggcatggtctg

SEQ ID NO: 38160 - DNA, 260 bp, Unknown
  Description of Unknown: RightRegion for integrase A728 sequence
ataacaggtactttcgcttcttgtctcttctcgcgatttccttcaccgcgacgcgtgacatcgagattgccataatttcgaccctcatatttctcaccatcatctacctgattaagacgcccgaagagcgagcaaaggatgggttcctttaaatttttgaaatttcaaaattttcccgccaaaaaagattctcaccgacgatgaggcacgcgccagaacccagcgcgtgtgtcatggtgcggtcaccggagcgtccgaag

SEQ ID NO: 38161 - DNA, 260 bp, Unknown
  Description of Unknown: RightRegion for integrase A729 sequence
gcagatgtgataggggtgaatgtgaagacgctatataagtacctaccagccgctgtgtagtcgttgggatggggcatggatggggcatgggaagtcagtgaaatccgccaaatattgcaaacaacgcatgttgatcactacatccagccattgaaaatggcgctcctggacgatatttgtcgatttttaaaactaactcatcaccgtggtgatatgacgagggtgactcactaccttgttgatatataagattattgttt

SEQ ID NO: 38162 - DNA, 260 bp, Unknown
  Description of Unknown: RightRegion for integrase A730 sequence
gtatcaaaaacgtatggagtagggctctcaactctgtataaaaagtttccagctagctaataacgggaaagaaacagagaagggcacaaatattgtgtactttaatgtgccctttaatttattgattggtggttgaattgtccgtaactttttgatttaagtgcaaatttctaataaattagaacactttcttaaattgtcatttggcatattacgaacaattccgcgtaaaaacgttctgttacgctaaacccttatcc

SEQ ID NO: 38163 - DNA, 260 bp, Unknown
  Description of Unknown: RightRegion for integrase A731 sequence
gtatcaaaaacgtatggagtagggctctcaactctgtataaaaagtttccagctagctgataacgggaaagaaacagagaagggcacaaatattgtgtactttaatgtgccctttaatttattgattggtggttgaattgtccgtaactttttgatttaagttcaaatttctaataaattagaacactttcttaaattgtcatttggcatattacgaacaattccgcgtaaaaacgttctgttacgctaaacccttatcc

SEQ ID NO: 38164 - DNA, 260 bp, Unknown
  Description of Unknown: RightRegion for integrase A732 sequence
gtatcaaaaacgtatggagtagggctctcaactctgtataaaaagtttccagctagctgataacgggaaagaaacagagaagggcacaaatattgtgtactttaatgtgccctttaatttattgattggtggttgaattgtccgtaactttttgatttaagtgcaaatttctaataaattagaacactttcttaaattgtcatttggcatattacgaacaattccgcgtaaaaacgttctgttacgctaaacccttatcc

SEQ ID NO: 38165 - DNA, 260 bp, Unknown
  Description of Unknown: RightRegion for integrase A733 sequence
gtggcattacaaatgggcgtatctcgcgccaccctttaccgcaatctggagaatgcataatgtttgacatcaacctgaccaagaacgccctcacccaagtgcaagaggctcaagcccaaaacgcccagctggcccgcctgatgtgtgacgttgcggatggccgtcactacatgatcatgcagggtgccaccaccgtgagcgtggttgcccggcagcagggtgaaactagagtggtgaaggtctacccgactcccttcctc

SEQ ID NO: 38166 - DNA, 260 bp, Unknown
  Description of Unknown: RightRegion for integrase A734 sequence
gtcgccacccagatgggcgtatcccgcgcaaccctgtatcgcaatttggagaccgtataatgttcgatatcaacctgaccaagaccgccatcgcccaagtggaagaggcccagaagctaaacacccagctcgcccgtctgctggctgacgttgccaactcccgccacttcatgatcatgcaaggcgcctcaaccgtgagcgtggtggcccgccagcagggtgagcaaagagtggtgaaggtctaccccacgcccttcctc

SEQ ID NO: 38167 - DNA, 260 bp, Unknown
  Description of Unknown: RightRegion for integrase A735 sequence
attgccaagcagatgaatatttcccgttcaaccctttaccgcaatctggagaccgtgtgatgagcgagcaacttactgttgataactttactcacctgcttgagtgctcgcaccggttcaggcgacacgttaagcgctactggatgaagtgccacatcttgagcaccactaagagcggtagcctcaaggttcaggtctatggccgcctgtactggggtggcgatgaggcaaaaatcagatacgtcgagcccatccgtgtt

SEQ ID NO: 38168 - DNA, 260 bp, Unknown
  Description of Unknown: RightRegion for integrase A736 sequence
gtggcctcacaaatgggcgtatctcgcgccaccctttaccgcaatttggagaaagcataatgtttgacatcaacctgaccaaatccgccctcacccaagttcaagaggcccaagcccagaacgctcaacttgcccgcctgttgtgtgacattgcagatggtcgcggatacatgatcatgcaaggcgccactactgtgagcgtggttgccagacagcagggtgaaaccagagtggtgaaggtctaccccaccaacttcctc

SEQ ID NO: 38169 - DNA, 260 bp, Unknown
  Description of Unknown: RightRegion for integrase A737 sequence
gtggcaacacagatgggtgttagccgcgcaaccctgcaccgcaatttggagactgcataatgttcgacatcaacctgacccgcaacgccatcacccaagtggaagaggctcaagacctcaacgcccagttggcccgcctcatgtgtgacgttgctgatggccgtggctatatgatcatgcaaggtgccacaaccgtgagcgtggtcgcccgccagcaaggcgaaaccagagttgtgaaggtctacccctcccccttcctc

SEQ ID NO: 38170 - DNA, 260 bp, Unknown
  Description of Unknown: RightRegion for integrase A738 sequence
actatctgggttcgagcgaaagcagagcgtgacgccatcatggccgaacacgcctccaagatggccgacctacgcgccaagcaggaacaagacagagccgagctgatgatcaaggcagccgccatggcagagcgtcaggcacaactaaaaaccctctgggccacctccgcgcccaagagcacaaaatgggaatacaagtcatgatattcggatacgcaagagtgagcaccgctgaccagaatcaccagcttcaactggac

SEQ ID NO: 38171 - DNA, 260 bp, Unknown
  Description of Unknown: RightRegion for integrase A739 sequence
acagtcttcacagcaaaataccatggaaaacgaaagtataatttcgacaagaaagattagaatatttccatgtaaagaacatattgatttattcaataaatgttttggtgctactagatatatttataataaaacattagatgctattaaaaaattatacaaaaagaattccaaagctcttcgcaccaaagccaaaaaaggatgtgttcatatcgcaccaaagaaaaaatcaggaagtaaaactaccaaacataaaactc

SEQ ID NO: 38172 - DNA, 260 bp, Unknown
  Description of Unknown: RightRegion for integrase A740 sequence
aattaatagtttgtgcagcattttgaatcacaatatcaagttgattttttccaaatatttcatttatttctccaacaagattatttatcgattgttttacatttgataaatcaaatgactgattctaaaaatctatataaaacaaacaccagattttttatttataactgatataaacattaattattatttaatcattaatgtcgtatgtcagttccaaagaagcgcaagccttcttcaaagtctccgatcaaactctt

SEQ ID NO: 38173 - DNA, 260 bp, Unknown
  Description of Unknown: RightRegion for integrase A741 sequence
gcaaacgttaaaaaaaggattaaagatgagaatgagtcgaggggagcttatcggatttaatggttgtcttggttatgattaccatgccgaagataaatcattaagtgtcaatgaagaagaagctgaaaccgttagatacatttttaatcgctatattgagggcgcaggatgtttcgtaattgctcgtgaacttgagaatcttggatataaaactgcaggaggtaaaaccaagtggtttgattcatcagtaagagggatta

SEQ ID NO: 38174 - DNA, 260 bp, Unknown
  Description of Unknown: RightRegion for integrase A742 sequence
tacgtagtaatttgttgtgttgctccattttttgttatataatcactaatataattataacacatatcattgtaaatattatccgttcccattttagtgcaaaaatttattaaattaactgtttcttaaaatctatttaaaacaaacacctattttttttatcataactgatataaacattatttattatttaatgattaatgtcgtatgtcagttccaaagaagcacaagccttcttcaaagtttctgaccaaactctt

SEQ ID NO: 38175 - DNA, 260 bp, Unknown
  Description of Unknown: RightRegion for integrase A743 sequence
atcatcaacctgattaatcagggtattgtcgatgaacaaatgcgtgaacgactagatgataaacaggcgagctttgatgcaacacttgaaaatagtgaagcagtaacgaagttccaccaatctattgtgaagaagaaacgtaaaaagaaaaagaaagtcgtaagtgacgatgatgagtggtaagaggagatgaactatacatggaagcagttgaaaagaaacgtggcccgtggtcagaagaagaagatttaattttgatg

SEQ ID NO: 38176 - DNA, 63 bp, Unknown
  Description of Unknown: RightRegion for integrase A744 sequence
acgcaggccgccaacgacgaccaggccctcgacgacgacaggggcgccgacggggggtgagcg

SEQ ID NO: 38177 - DNA, 64 bp, Unknown
  Description of Unknown: RightRegion for integrase A745 sequence
acgcaggccgccaacgacgaccaggccctcgacgacgacggaggcgccggcggggggtgagcct

SEQ ID NO: 38178 - DNA, 64 bp, Unknown; identical to SEQ ID NO: 38177
  Description of Unknown: RightRegion for integrase A746 sequence

SEQ ID NO: 38179 - DNA, 66 bp, Unknown
  Description of Unknown: RightRegion for integrase A747 sequence
acccaggccgccaacgacgaccaggcccacgacgacgacgggggcgacgccggggggtgagccgtt

SEQ ID NO: 38180 - DNA, 260 bp, Unknown
  Description of Unknown: RightRegion for integrase A748 sequence
tgcctcaatggctaaacttgttggtttagctgtttgctgaatcatctattttacctctttatattctacttttaacgcgggattcatgagacaacgcctttaaacctatataagcactctatttaatttttgtctatcagtttgtatacagttatgtataatactatgggcaaaaataaactaatcaggctgcgttatctatggttactggattaaaagattatagtgactgcgtggggtattgtcgggtttctactcaa

SEQ ID NO: 38181 - DNA, 260 bp, Unknown
  Description of Unknown: RightRegion for integrase A749 sequence
gcaggattgaccggggtcgattcgttacgtacccgattgagcgattttcgtcagtgttaaaatttgaatttataacttattcgttcagtagatgattactctttttgtatactgatgggagaattaaggatcgatggagctattttggcagggttgaaagttaatggaattgataagttgggagatgtgaacatggcgtttgagcagattccagaacattttcgttttattgcggaaacacttagatggcaaacaacaga

SEQ ID NO: 38182 - DNA, 260 bp, Unknown
  Description of Unknown: RightRegion for integrase A750 sequence
gagatcacggtctcgtctgacgtggtggaagtgacggaagcagacttacaacacgactaaccaccacggcttactacacgcatgagtacacagtcgttcaatttcacatggaaactctcagccaaacagcgggagttattcgagtcagacgcgcggttccgcgtgggcatgatgggtcgccggttcgggaagaacgaagtctcgacggcgatagaagtcgattacgccacccaaccccacaaatacacgttcggcacaga

SEQ ID NO: 38183 - DNA, 79 bp, Unknown
  Description of Unknown: RightRegion for integrase A751 sequence
agcctcggagaggccctcacaggggctttcgcagacgacccgggcgaggacggcggatagcccgtcgagggggtgagca

SEQ ID NO: 38184 - DNA, 79 bp, Unknown; identical to SEQ ID NO: 38183
  Description of Unknown: RightRegion for integrase A752 sequence

SEQ ID NO: 38185 - DNA, 79 bp, Unknown
  Description of Unknown: RightRegion for integrase A753 sequence
agtctcggagaggccctcacaggggctttcgcggacgacccgggcaaggacggcggatagcccgtcgagggggtgagca

SEQ ID NO: 38186 - DNA, 260 bp, Unknown
  Description of Unknown: RightRegion for integrase A754 sequence
agttatttgagcgatgaagaattagacaaagaattgaaggagttacaaggcgatgaataaaacaatgagcagggccgaaaaagaaaagctgtttatgctcattcgcgaaaagagaataagagcggcccgccggagtttttgggaatattgccgtttggagagcccggacttttacacaaaagagcgttggcatttgcagctttattgcgaaacgttgcaagccttgtacgagcgccgattaacaaaacaatgttttcgtg

SEQ ID NO: 38187 - DNA, 260 bp, Unknown
  Description of Unknown: RightRegion for integrase A755 sequence
actcggtgaaaaaaaatctctcgagaaatatgatttgtttcatctgagaataacgaatagtacaatgaatatatattcagttcatgctagtttcaatttttgcaatgcccaagaaaaattgaatattgaatgtaatataggtcccattagttagtggactaagtatctccagttattaattttctgactcattgcagattatggccacagttgtcgttgatggtaaagagcgaagtagtaattacgatcgacaccataat

SEQ ID NO: 38188 - DNA, 260 bp, Unknown
  Description of Unknown: RightRegion for integrase A756 sequence
tacttattagatatattcctattccatatcgcaccagacctaaaagtttggtactatctatttacagtggcatttataggagctattaaatcagtcatcttagtagaaatacaagacaaaagagaaaacaacaaataaaagtattgacacatcctccttgatactgtatacttattatatactattaaggagggttgtaattgagaaaattaactactacagatatacaagagatatatgtaagcactcagacacaaaag

SEQ ID NO: 38189 - DNA, 260 bp, Unknown
  Description of Unknown: RightRegion for integrase A757 sequence
ttaatagaagacttaataaaggaatattcaggaggaacaataaaaacaaaattatcgtagataacagtacaaacaattattttttcatagcgccgtttagccaagaagaaatagatgcattaatacctgaagaaaaaatattaatttttcaatttattcaatgtaatttataaaaattaaattaaacaaatttactgacgagctataatgcggcgcttttcttgaagactttgcaattttgaatggaacgcaaactgttt

SEQ ID NO: 38190 - DNA, 260 bp, Unknown
  Description of Unknown: RightRegion for integrase A758 sequence
agtgggagcaggtcggacggttgctggctgcgggggaatctcgtcaacgtgtggcactgatttttgatattggcctgtccacgctctataaaaaattcccctcatcagcgacaaagaataaattgtgtcatcccttagccaaccgggacaaatagcctgacatctccggcacaactgaaaataccactcacccattaaccacggagttaaccggatgagtgactatcatcacggcgtgcaggtgctggagattaacgacg

SEQ ID NO: 38191 - DNA, 260 bp, Unknown
  Description of Unknown: RightRegion for integrase A759 sequence
gagtggaatgtctcatctgaggtggtcgaagttgtctcgagcacaaccgaactcgaatagaacaatcggctatcgactgtctgaactccagaacagaatttatgactcagatagccggtttcgagttgcaatgatcggtcgtagaggtgggaaaaatgaggctgcgacagttacagcagttgattatgcaattgacccatcgaagtatgcatatggggcagatgagagtcctgtcatttggtgggttggtccgacataca

SEQ ID NO: 38192 - DNA, 260 bp, Unknown
  Description of Unknown: RightRegion for integrase A760 sequence
atttccgttgttatcgtatcccctacatatttatgagtgtttgccattgcaaaacaccgcctctctttaagttgataccatcgtaccatgtattttactaaaagacaacaactattttatatatttttcgtttttcgcctttcttctattataggcgaatttattaaatgtgatataatagagaaaagggggctttattaatgccatatatcaatgaaaatatagaattacacgggaacgctaaaaggatagaatacgag

SEQ ID NO: 38193 - DNA, 260 bp, Unknown
  Description of Unknown: RightRegion for integrase A761 sequence
atttccgttgttatcgtatcgcctacatatttgtgagtgtttgccattgcaaagcaccgcctctctttaagttgttaacatcgtatcatgtattttactaaaagacaacaactattttatatatttttcgtttttcgcctttcttctattataggcgaatttattaaatgtgatataatagagaaaagggggctttattaatgccatatatcaatgaaaatatagaattacacgggaacgctaaaaggatagaatacgag

SEQ ID NO: 38194 - DNA, 260 bp, Unknown
  Description of Unknown: RightRegion for integrase A762 sequence
gtttcatcgccggacatagaaatatcggtctctgaggcaacatatgagacatggcagtagcgcaagagtcaatcagtattaccccgaccgagtatcaagacgtattcttacgtaaagacaagcgttactatgcatttgtctcaggtgttggggcgggcaagacctacgctggtattgtccgaacgattctcaatatgcgtgattggaatcccggggaaatgggtgcaatcgttgcaccaacacgacagatggttgtaaac

SEQ ID NO: 38195 - DNA, 260 bp, Unknown
  Description of Unknown: RightRegion for integrase A763 sequence
gtctcatcaccggatatagaaatatcggtttctgaggcaacatatgagacatggcagtagcgcaagagtcaatcagtattgacccaacagcgtatcaagacgtgttcctacgcaaagacaagcgatattatgcgtttgtctcaggtgtcggagctggcaaaacctatgctggaattgtcagaacgattctcaatatgcgtgattggaatcctggcgagatgggggcaatcgttgctccaacacggcagatgattgtgaac

SEQ ID NO: 38196 - DNA, 260 bp, Unknown
  Description of Unknown: RightRegion for integrase A764 sequence
tttctgatatcatcttatcatgcaacataactttttgtaaagtgttatttttaacttttttaatttgttgttttgttatgttgcgttgttgatgtctcttatattaaaggtattatatttgaaagtcaacaggtttatgcaatttattttaaaaagttaaagttaatcatgatataatagagaaaaggaggtttttacaaatgccatatatagaagaaaaagttaaactacatggaaacgctaaaaggattgagtatgaa

SEQ ID NO: 38197 - DNA, 260 bp, Unknown
  Description of Unknown: RightRegion for integrase A765 sequence
tacaaatacctagagaagaacaactatgaatacaaaaatcaaaaactcaaacgaaagtgaatacatgccatctgttcgtggtaatccagcagatgcattgcagacattcttcgttaccattcgtgacacccgcacaggagaactacatgaggacatgagaactcatcactacaatgatgaagcctgtgcatactcagtcatgcaaaatttaaaagatgggtttgagctagtccacgttttcaacccagaactaaaaacta

SEQ ID NO: 38198 - DNA, 260 bp, Unknown
  Description of Unknown: RightRegion for integrase A766 sequence
atggatacaacagaaatagaagcagccatagctaagataagaataagaacaaaaaagtaatacttaatactcattaattttaattaaaaaaactaccattttatagatatttgatgtaaaaataaagcatggtgtaaatttacattgtaaaatatctattttgatgtaaaaataaaattaaaaacgtaattaatttacaaaaagaaggataagtctttgactctaattttacatttatgctataatattatttatagagt

SEQ ID NO: 38199 - DNA, 260 bp, Unknown
  Description of Unknown: RightRegion for integrase A767 sequence
aaaatagatgctcccattttgttacgcacccgattaagcgattttcgcacatcgagatgaacagataatgtacaaaaaattgatttatatggtggagaggatgtcctttatctctggatatatatcagaagctgcaatggccgcagctgtcgccgttgttgaaagtaaaaccggtcatgatggatttcctaattttttcgaagacttttatgaagttaaaccgaaagacacgactgtggcgtgtatcgcgagtgccaaag

SEQ ID NO: 38200 - DNA, 260 bp, Unknown
  Description of Unknown: RightRegion for integrase A768 sequence
ggctgctaccagcgcgcgcggagggcattgcgccgggtggccgaggaggtggggctgtgagttgccgctaccagttcatgggcgagcaggaggacgccgacctcgacgtggtgctgtcgaggggcatgacacgcgtctacgacggtacggcggcgccgcgctccgggcgtgtcggctgccccatcgccgggtgccccgacgctgaggcggaggacaccctgtgtgaggcgcactggatggagttccatgcatcgcctgag

SEQ ID NO: 38201 - DNA, 260 bp, Unknown
  Description of Unknown: RightRegion for integrase A769 sequence
cgtacaaatgcggaaatcgaagaacagcttcagaaattaaaaaaattgacaggcgagtaaaaggagggcgggctacatggcatatatagacggtaaatggttagcccgtcaagaacgtcaggagcgtatcaatcttgtagcagaaagagcaaagaaattacaggagttgtacgaaactggcgaggctacagaatattatatggatacactacttgctgacatcgatgagctagaaaagttaaaaagggtacatcgtggag

SEQ ID NO: 38202 - DNA, 260 bp, Unknown
  Description of Unknown: RightRegion for integrase A770 sequence
tcagaaattgcaagaggtaaaaaattcggtgaggttgtagaaatggaggaagcaaactaatgtgtgaagttaaaaatactatggcccaattagaagcagctttaaaagtaaatccatcaattttaaaaggtgtacaagctttaataaataaatacgatggcgcagcagctcccaactcctacgccgcattaaaaaacaatatcactaccagtaataccctaaacacgttgattgtattctgccaaaattgcgatttacaa

SEQ ID NO: 38203 - DNA, 260 bp, Unknown
  Description of Unknown: RightRegion for integrase A771 sequence
attgctcgtaagtttggatgtaagcgggatactgtataccgacttttaagactacgttgatttaggtgacactatagaaggtagcctaggtaatctaggtcttataggtagtatagataaataagctaaatataggagattaaatatgtcaatggtaactactctggtagcactgtctcaattcttccgtaacctgtccactcgtatccgtaacaaggcaatcaatgcaatcaaagaccgcatcgctgtggttgaagacc

SEQ ID NO: 38204 - DNA, 260 bp, Unknown
  Description of Unknown: RightRegion for integrase A772 sequence
cccaagccggctgcggacaaggcaaagctggtcagcaagattgaggcccagctggctgaggccggcaggccatgggagtacggcgacggtttggcaaagcgcctgtaccaggtagagcggctggagtggcttgactccaagcaactgggtggcgtcgtcgccgctctggccaaggacgcgaaacgacacgggaggcgacaatgagcaacggagagttattcgatagtggggaggtcgacaagctagagccggacaaggtg

SEQ ID NO: 38205 - DNA, 260 bp, Unknown
  Description of Unknown: RightRegion for integrase A773 sequence
accacgctgcgccgccacgggcacgcgctgggcaccaagggccgtgcgtcgtggacgtagacacctcgttcgactgggacgtctggcgcaaggcctggggcagcaacaagcaggtcatcgtcggcggggtcaacgacttcttcgcgctcccggagccgccgggggattgcgagtggctgctgacccggaccctgaccggcgagcaccccacctacaagctggcgctgctgtggcgcgagctgttcgacaccgggccgcac

SEQ ID NO: 38206 - DNA, 260 bp, Unknown
  Description of Unknown: RightRegion for integrase A774 sequence
gcgtgttttttagaaaacccaataaagataattataatgtagatgccttagatcttgtagatttatgcaatcgttcatattcagacatatctaattccatattcgttaataaaaaagcagatagcatagatgactagtttgtctcaagtcgttacaacgtgtgtttaatttaaagcttttttatattatccattatataaatggaagtagattatgttacaacgaaagaaacttgtcgaattacaggtttcaaagctcca

SEQ ID NO: 38207 - DNA, 260 bp, Unknown
  Description of Unknown: RightRegion for integrase A775 sequence
tatgcggatgagggaatctcagcaactaatacaaaaaacgtgatgcttttaaccgactaatacaagattgtagagatggtaaggtggatagaattttagttaaatctattagtagatttgccagaaatacattggactgcatcaaatatgtaagagaactgaaagaactaggcattggtgtaacgtttgaaaaagagaatattgatagtctagattcaaaaggagaagtactacttaccattctatcgtcactagcacag

SEQ ID NO: 38208 - DNA, 260 bp, Unknown
  Description of Unknown: RightRegion for integrase A776 sequence
aatgtagagagaaaaacaggttctaaagaagaagtacttaatgatgaacaagaggaataagaaattgtagtagaattgtaggtgtgtaacatatgagtttttcagataaattaaatgagatgaggaataaagaacattatggttctcctagtaatgaagaaaatacacaaataaagaatatagaatcaggttatacattagaagagcttaaacattccttattagatttagaaggtttagaaaatgtagtaagtaattac

SEQ ID NO: 38209 - DNA, 260 bp, Unknown
  Description of Unknown: RightRegion for integrase A777 sequence
gacgctgatttagagcaagaattgggcgaactagacgaattattaaaggacgatgattgaaacgaggtgataacgagtgggaattttgagtaaaatcggacgcaaatccgacgcagagttaaacgaaaccggatccgtcacttacacatatgacgcattcaagcctggtgaacaatttccgccagcaaacgcaattgaaagaatttcgaaatatcgtcgtatgaaaaagttatatgacggtaaacaagccgaaatatacg

SEQ ID NO: 38210 - DNA, 260 bp, Unknown
  Description of Unknown: RightRegion for integrase A778 sequence
gacacatcacctgcaaatgacaacactcccgaacgactactaaccgctatggggcaatgacgaaatggagtttttccagaaatttctagataacattgggtggggcatcgctggcataatgggtgcgctggtttcgctcccgttccacgatgacatcaaatctgtaaaggcgcgcatctggttcgtgtgtaccggtgcaatctgcgcttacttcctgacagacctggtttctttgtatttcaaaattgatcgcgggctgg

SEQ ID NO: 38211 - DNA, 260 bp, Unknown
  Description of Unknown: RightRegion for integrase A779 sequence
atacattaatataggaaattgttgtcaccttagtcacccgaacgccaaaaacgcgcactttctctttataaatcaagatgattgacgggtgacaagcgggtgaccaactctttgccaccttgtcacccttttctggtcaccgttcatcttttcggctacaatccccatattgacttttatttataattattgggggttacatggaattaccgcgcactgtgcaggaaatagctgacgttattggccgtgaacgtgcgcta

SEQ ID NO: 38212 - DNA, 260 bp, Unknown
  Description of Unknown: RightRegion for integrase A780 sequence
aaagaactaaatgtaaaacatccacaattattaaaatatatatcagacaagaatttataaaaaagaattggtttattttttcgttttagaatttttctttactgttttttcttcctcttctgaacttgattctgaaaaactgctttccgattcactttcttcttttttagaaaattttttttgtttctttttatctttgatattttttatttttacatcttctttttctgattccgaatctgatgaactactttcttttt

SEQ ID NO: 38213 - DNA, 260 bp, Unknown
  Description of Unknown: RightRegion for integrase A781 sequence
gtaatgaaacgcattgaagaattgcgtaaaatgcaggagtcggtgaaacaggatgagtagtaaatctagcgaatttatttcgccgagagaggaacgtctcgagcttcaacggttacttaccgaagagttgtcgctattaatcgagttgattgagtgggggaaggcggaaccttcgcactatgaccgctttaaagaagtagacgaagagttaacgcaaatcaaacgaattaatcgcgctgaatatgacgtggcctattttg

SEQ ID NO: 38214 - DNA, 260 bp, Unknown
  Description of Unknown: RightRegion for integrase A782 sequence
cagaccatgagtattagtgattctaaaggacaagaatttaaagttgagtggtccaaatgaactttgatatgaaaacagtattgccttacatcgtgattgtagcaagtttagcgatgacatggggtatgtggagtcaaagattagaagctgttgaaacaaaagcagattctatatcatatatgcaacaagatatagctgtcatcaaagaaaaaataatatggatagagaactaccttataggtaattaatgaaaatgtttt

SEQ ID NO: 38215 - DNA, 260 bp, Unknown
  Description of Unknown: RightRegion for integrase A783 sequence
cacgggcaaagatcggaagggttacgccagtaccagcgcagccgtttttccatttcaggcgcataacgctgaacccagcggtaaatcgtggagtgatcgacattcactccgcgttcagccagcatctcctgcagctcacggtaactgatgccgtatttgcagtaccagcgtacggcccacagaatgatgtcacgctgaaaatgccggcctttgaatgggttcatgtgcagctccatcagcaaaaggggatgataagttta

SEQ ID NO: 38216 - DNA, 260 bp, Unknown
  Description of Unknown: RightRegion for integrase A784 sequence
caggaaattgaacatactggaacggtggtgtttgcgaatgaagacaacatcccagattaaagttgatttgccaactatagttggagaaggttacggggctttttggggtgataaacatttttatagagtggtaaaaggtagccgtgggtctaaaaaatctaagactaccgcccttaattttatagttagattactgaaatatgaatgggcgaatttattagttgtccgcagatattcaaacactaataagcaatcaacct

SEQ ID NO: 38217 - DNA, 260 bp, Unknown
  Description of Unknown: RightRegion for integrase A785 sequence
agaaagctgcatacacggcgtcatcagcctgatctgttctcacctgaaagcccaaaataaccggcatcctgccggttatttcctgtcaccataatcccgcacctgtcacctgattttttagactgccatcagagatttttttcagggaagcatgatggcggggataccaaaaaaactgaaagccgcactgctggcggcaacgattgccggtggtggtgtgggtggttatcaggaaatgacccgtcagtctctgatccatc

SEQ ID NO: 38218 - DNA, 260 bp, Unknown
  Description of Unknown: RightRegion for integrase A786 sequence
agaaagctgcatacacgacgtcatcagcctgatctgttctcacctgaaaccccaaaataaccggcatcctgccggttatttcctgtcaccataatcccgcacctgccacctgattttttagactgccatcagagaattttttcagggaagcatgatggcggggataccaaaaaaactgaaagccgcactgctggctgtaacgattgccggtggcggagtgggtggttatcaggaaatgacccgtcagtctctgatccacc

SEQ ID NO: 38219 - DNA, 260 bp, Unknown
  Description of Unknown: RightRegion for integrase A787 sequence
tggccgaggtgatcactaaaagtggtggtcgcattccatcgaacaacgattgcacaggcccagctggttacgaactattagctgaacattatgcgagtaactactacaaaactggttaacgtgccccaccagtaaacactgccatatactacaaacacctcgccaagcggggtgtttttgtatttatactatgtgaaggtatgccatgtggatgggaggcagtaatgagtgaagaaaaccaagacttgtttggctacaag

SEQ ID NO: 38220 - DNA, 260 bp, Unknown
  Description of Unknown: RightRegion for integrase A788 sequence
agaaagctgcatacacgacgtcatcagcctgatctgttctcacctgaaagccagaaataaccggcatcctgccggttatttcctgtcaccataatcccgcacctgccatctgattttttagactgccatcagagcattttttcagggaagcatgatggcggggataccaaaaaaactgaaagccgcactgctggcggcaacgattgccggtggcggtgtgggtggttatcaggaaatgacccgtcattctctgatccatc

SEQ ID NO: 38221 - DNA, 260 bp, Unknown
  Description of Unknown: RightRegion for integrase A789 sequence
aatcctatgaggcaagcagaatatgcatatagtttaatcggaaatgaggtgagcacttaatgaatcttgctaaaaatattaccatgattcctacaagaagaatggtgggtacgcaaaagcctgcagaaaagacacaaaaattaagagtcgcagcctacgccagagtatctacggagtttgaagaacaggaatcaagttatgatgtgcaggttgaacattatacaacttatattaagagtaatccggaatgggaactggta

SEQ ID NO: 38222 - DNA, 260 bp, Unknown
  Description of Unknown: RightRegion for integrase A790 sequence
ccagttgatccttttgaacgagcagaatacttatatagtctgatagaaagcgaggaataaagtgacagagaaaaatataatggttattcctgctcgtaaaagagtaggaagtacagccgcaaaagaaaagataaagaaacttcgtgttgctgcctattgccgtgtttctacagaaacagaagaacaaaattctagttatgaggttcaggtcgcacactatacagagtttataaagaaaaataatgaatgggagtttgccg

SEQ ID NO: 38223 - DNA, 260 bp, Unknown
  Description of Unknown: RightRegion for integrase A791 sequence
tctgctgtacttaacacattcaaagagtgcgaagataaaatagtaggtatagaagaatagataataaaaagatagcctagtttataagctatcttttttcattatgaaaaaattttaactagataagggactataaatattaataggatactcataatacctagtctaacagcaacatctatgttcatatggctacttttcttcacaaaatcacctcgactatttttctaaattattaacgaaaaaggaaataatataca

SEQ ID NO: 38224 - DNA, 260 bp, Unknown
  Description of Unknown: RightRegion for integrase A792 sequence
gatccatataagcaggcagagtatgcatatagtcaaatattggaggtagcaaatgaatgagaacgtaacattgatacctgccagaatacgagctggtaatcgaataacaaggcaagaaaataagcctaaattaagagtcgcagcgtactgtcgagttagtactgacagcgatgagcaggcggggagttatgatgtgcaggttaagcactatacagaatatattggcaggaataaagaatgggaacttgctgggatatatg

SEQ ID NO: 38225 - DNA, 260 bp, Unknown
  Description of Unknown: RightRegion for integrase A793 sequence
ttctgggcttaccccttcctgaccgacttcacatcattccgcccgctattactcaaatagcactttttgccaaacacgccgggggcaaccccggtaatatgctttccatcggcagcgaacgcagccaaccacttaaaaggaaacgcatcatgaccactaaaactgaattattcgcagagttgaacgataaagaaaaccgcgtaaatgctaccgcccacatcgcagtatataaagacggcaacggtaacacctctgtgatt

SEQ ID NO: 38226 - DNA, 260 bp, Unknown
  Description of Unknown: RightRegion for integrase A794 sequence
caagatataaacgaattagaaaatgaattaaataattttagattaaaaaaagttaaataaaataacaataaaagaaagttagataaatcttaactcaatataatttttattatattgagttacatatagtgtatgaaaaataatcgtatacaatatgtagtaagaggggtcgaaactatattattgttaataattgtaagattgataaaaaaatatacccccccccacacccttattttgaaaaaatcttttttaaggga

SEQ ID NO: 38227 - DNA, 260 bp, Unknown
  Description of Unknown: RightRegion for integrase A795 sequence
ttcagcgcctacccattcctgaccgacttcacatcattccgcccgctattactcaaatagcactttttgccaaacacgccgggggcaaccccggtaatatgctttccatcggcagcgaacgcagccaaccacacaaaagaggccaaagcgatggaaaacatgacagtaaaaaccccggtagatatccagatgcaaaagttcaacgttaagacagcgattcacactttcaagtttcacgccgtgcgcaacgctgaagcatt

SEQ ID NO: 38228 - DNA, 260 bp, Unknown
  Description of Unknown: RightRegion for integrase A796 sequence
ttcagcgcttaccccttcctgaccgacttcacatcattccgcccgctattactcaaatagcactttttgccaaacacgccgggggcaaccccggtaatatgctttccatcggcagcgaacgcagccaaccacttaaaaggaaacgcatcatgaccactaaaactgaattattcgcagagttgaacgacaaagaaaaccgcgtaaatgctaccgcccacatcgcagtatataaagacggcaacggtaacacctctgtgatt

SEQ ID NO: 38229 - DNA, 260 bp, Unknown
  Description of Unknown: RightRegion for integrase A797 sequence
ggcaaaaccctagaggacttctacgccgacgaagatgtaccgcctcaatccagtccttaaagacttctggacaacccggaagccttacaagctactcaagggaggccgcttttcctcgaagacgcaagacgctggggggatggcggcttttttggcgcgcaactattccgtccgtttcctttgccttcgccagtttcagaaccgcatagctgattctgtttacacggtcgtgaagcaaaagatcgaggaagcaggctggc

SEQ ID NO: 38230 - DNA, 260 bp, Unknown
  Description of Unknown: RightRegion for integrase A798 sequence
ccggactgccggagatgtcagggccaaaaatccgtccaccacacctgccagagcaactaggagccgcaatgaccgccaccgaaatcgacaccaaatcaccgacccgtatgggagtcctcgcctgtggacactgcctcgtggggcaccatggctgctgcccgggtggagtccgcaatggcaacggccaaatcatcctctgcgcctgtaagtgggacggctgcagggcagggcgaccccgctgcaccgactgcaacaaccgt

SEQ ID NO: 38231 - DNA, 260 bp, Unknown
  Description of Unknown: RightRegion for integrase A799 sequence
ccggactgccggagatgtcaaggccaaaaatccgtccaccacacctgccagaacaactaggagccgcaatgaccgccaccgaaatcgacaccaaatcaccgacccgcatgggagtccttgcctgtgggcactgcctcgtggggcaccatggttgctgcccgggtggagtccgtaatggcaatggccaaatcatcctctgcgcctgtaagtgggacggctgcagggcagggcgaccccgctgcaccgactgcaacaaccgt

SEQ ID NO: 38232 - DNA, 260 bp, Unknown
  Description of Unknown: RightRegion for integrase A800 sequence
cattccatcggtgaaatgacagacgaagatcttgcaaaggttattgcgggggagaaataacctcgtgaccataaccaaagcccaagccgcccaagagcttctaaacagacgtaaggctcgtcgaaatctggttgattatgcccggtacattgaggttccgggagctcctgttgaagaacaggacgaggaaagcgacgaagcagaatattttgctgagacgcagttagctaaacatcacatattgatacttgaagccgctc

SEQ ID NO: 38233 - DNA, 260 bp, Unknown
  Description of Unknown: RightRegion for integrase A801 sequence
gataaaagtatgcagcatatctatcgcgtagtcgctaaaaatgcgcaagatagaagttaagaaccgtcaaccgaatttattttaaggaattgaaaatgaccatattcgacttaatagttactttaatcgttggatttattactgccttccctctttgtagggttgctaagaatcaaggcttcaaagccgattggtgggtaatgttagtattggttctgatacctgttttacaaatcccttatctttactggattgctttt

SEQ ID NO: 38234 - DNA, 260 bp, Unknown
  Description of Unknown: RightRegion for integrase A802 sequence
cgcgtagtggctaaaatgcgcaagatagaagttgagaaccgtcaaccgaatttattttaaggaagggaaagtgaaaaaattatgtttgatgcttatgatgttatcaccaactgcgttagcttcgacagttgatgagttaattgaaagctttgaaaactctaatatctatagtgctgattggtatgaaaaaggctctagcaaaattgctgaatcatcgaatgactatagagacatcaaggtaaatttaactgacaaaaaag

SEQ ID NO: 38235 - DNA, 260 bp, Unknown
  Description of Unknown: RightRegion for integrase A803 sequence
tgtgcgaactcttggcctacttcatggggctgtggatataggctaccataaaaatgaaggtacttatgtctatgagattaatactgcatgtggtttgatggggacaaccctacagctatatgcaaatgccttccgtagatattttggtctggcggaggttgtatatgaaaaagagaatacttaaaaaatatcttcatcctgtgttcagaaaaaaccaagattattttattgatgaaattggtaatgttacacgaaaggat

SEQ ID NO: 38236 - DNA, 260 bp, Unknown
  Description of Unknown: RightRegion for integrase A804 sequence
gtgaaagctctccagaatgtcattctcatactaggtcatcaacattcagaggatgactagctatgaagaaattccgttgggctaagaatcgtcctgttaaaccagacacagacccaatgctctcagatttgagagaggaattgctcaatgacgataggacttattaccagaaagccaatgcctctgggatagctccatccacaatcagaaacatcgtgaatggtaagactcgtaaaccacagggacttaccatcatgatg

SEQ ID NO: 38237 - DNA, 260 bp, Unknown
  Description of Unknown: RightRegion for integrase A805 sequence
aaggccattcgccggatgcgacggctgaaataccgccagtaccagccctcacttctgtaaacagtaaagccggttaatccggctttttttacgtcctcaatatcctgtgatgaataaccgtaccgggggaaatcatcatgggtaaaggctggaatgcatcctttcatcttggcagacgtgagcggctgcgtcaggaggttttgcaccgtgtcgccggtgggccacggcctgcgccccgcgactataccggtcatgatggc

SEQ ID NO: 38238 - DNA, 260 bp, Unknown
  Description of Unknown: RightRegion for integrase A806 sequence
aaagccattcgccggatgcgacggctgaaataccgccagtaccagccctcacttctgtaaacagtaaagccggttaatccggctttttttacgtcctcaatatcctgtgatgaataaccgtaccggggaaaatcatcatgggtaaaggctggaatgcatcctttcatcttggcagacgtgagcggctgcgtcaggaggttttgcaccgtgtcgccggtgggccacgtcctgcgccccgcgactataccggtcatgatggc

SEQ ID NO: 38239 - DNA, 260 bp, Unknown
  Description of Unknown: RightRegion for integrase A807 sequence
ttggctatatcagggtgtcaacaaatgaccagaacactgatttgcagcgtaacgcgctgcagagcgcaaattgtgaactgatttttgaagacagaataagcgggaaaaagtcagacaggccgggactgaaaaaagcactgcgctgtctgcaggaaggcgacacactggtggtgtggaagctggatcgtcttggccgcagcatgcgccatctggttatgctgactgaggaactgcgcgaaaaaggaataaacttccgcagc

SEQ ID NO: 38240 - DNA, 260 bp, Unknown
  Description of Unknown: RightRegion for integrase A808 sequence
ctcttctttttgtacttattttgaaatattcttaattttttatattcaatcataaatcacctaattttatcgctgagttaattatctgtaattaaataatatatatttagctatataatttcctaataacatatagtttacagattcggaaaatgatgatataataaatttacaagaagatatatgagaggtgaaataaattgagtagaaaaagaatgctttctgagaatgatgtaaaagaaatattacagttaagagat

SEQ ID NO: 38241 - DNA, 260 bp, Unknown
  Description of Unknown: RightRegion for integrase A809 sequence
gatcatgttgtgattctcctctattcgtgtcgcttggttgacatgtaggtccatttggaccctatgtctagcatcttttcactttttgggtgaaattatttttacgcttaactttccccttttggttgacatgtgactcgggacaggagtacggatcagacaacccggcacggaatcgccggacctaagaggagagaaatatgtcgtcaaaacccaagcccggtttcatgcgcccgagggcgaaccgggatgagatggcc

SEQ ID NO: 38242 - DNA, 260 bp, Unknown
  Description of Unknown: RightRegion for integrase A810 sequence
ttctctggaaattttgaacttgtaattgatgggaatgagataaatgattctgaggattaaacatcctgaaaagatatttaatgatgtatattttaaaaatttgaaaaataattttggaacacagatttattttggtggggcatcttctgggaaatctttttttattttagggcagaggacaatattagatgttttaacttctaatagaaatttccttattgttagaaatgttgcgagaacaaatagacattctactttta

SEQ ID NO: 38243 - DNA, 260 bp, Unknown
  Description of Unknown: RightRegion for integrase A811 sequence
ttctctggaaactttgaacttgtaattgatgggaatgagataaatgattctgagaattaaacatcctgaaaagatatttaatgatgtatattttaaaaatttgaaaaataattttggaacacagatttattttggtggggcatcttctgggaaatctttttttattttagggcagaggacaatattagatgttttaacttctaatagaaatttccttattgttagaaatgttgcgagaacaaatagacattctactttta

SEQ ID NO: 38244 - DNA, 260 bp, Unknown
  Description of Unknown: RightRegion for integrase A812 sequence
atcgcctgcgccgtggacgtctatcacgacgaaacctcagagaccgctgctgcggcctgaatgtcaaccgaaagaggagtattacaccgatgagaaccagagtgaacgtaggccgggtgatcctgccgctccacggcaagagcaaggccccggcgcagcgcctcgcgcattggatggcgatgcaggagatggcgggcttcaaccacctcggccacccgcgcggtttccgtatcgccccgacgagccggaagaaccgccgg

SEQ ID NO: 38245 - DNA, 260 bp, Unknown
  Description of Unknown: RightRegion for integrase A813 sequence
aatgccaatgtagaaaaagttaaatcattctcggagatgtatggcaacgttaaatcctaatctcatcgactattggttcgatggcaatccagagcctagtaacttcataaaggttcgtcaccgcgttttatatggcggtcgttcgtcatctaaatcatgggagtttgctggaatggctgcgtgtcttgctaatcaatataagacgcgctttctgtgcgttcgtagatatcagaacaagattaaggaatcggtttacacgc

SEQ ID NO: 38246 - DNA, 260 bp, Unknown
  Description of Unknown: RightRegion for integrase A814 sequence
aagaaagtcactaaagaagaaattgcaagacggcagtttgatatgtttggcaatacgtaactgctagaagtgagaaaaaacgtccagaagggcgtttttttattcatatttatttacctttttggtaaataaaaaatgttgactaatatgttttaattcattaaaatgcgctttagatcaactagaggagagtaattatggcacttacagaattcggcaaagcggttcgtaaggcaagaattgatgctaacgaaactttg

SEQ ID NO: 38247 - DNA, 260 bp, Unknown
  Description of Unknown: RightRegion for integrase A815 sequence
aatgctaacgtagaaaaagttaaatcattctcggagatgtatggcaacgttaaatcctaatctcatcgactattggttcgatggaaatccagagcctagcaacttcataaaggttcgtcaccgtgttttatatggcggccgttcgtcgtctaagtcatgggagtttgccggaatggctgcgtgtcttgccaatcaatacaagacgcgctttctgtgtgttcgtagatatcagaacaagattaaggaatcggtttacacgc

SEQ ID NO: 38248 - DNA, 260 bp, Unknown
  Description of Unknown: RightRegion for integrase A816 sequence
gacgagcaatcgaagatgatccgcggcctctggcttgagctggcggatcggggcgtcgtacagaaccggtccgaggaagcgctcggggctttcgtaaagcgcatgacccatgtcgatgcgctcgaatggctcagttccgcccaggcatcccgtgtaatcgagcacctcaaaaaatggcgtgacaggacgacggaggccgtatgaaggacgaaacgttcaaaagcaaagggccggaactgctggtcgacttgtctctgcag

SEQ ID NO: 38249 - DNA, 260 bp, Unknown
  Description of Unknown: RightRegion for integrase A817 sequence
gacgagcaatcgaagatgattcgcggcatctggcttgagctggcggatcggggcgtcgtgcaaaaccggtctgaggaagcgcttggcgctttcgtaaagcgcatgacgcacgtcgacgcgctcgaatggctcagttccgcccaggcatcccgtgtgattgagcacctcaaaaaatggcgtgacaggacgacggaggccgtatgaaggacgaaacgttcaaaagcaaagggccggagcttctggtcgacttgtctctgcag

SEQ ID NO: 38250 - DNA, 260 bp, Unknown
  Description of Unknown: RightRegion for integrase A818 sequence
gatcaagcaacaccaaaaagtataaaagtggaagtgatcgacgctagacaatctaattaatgaaactaagcgtcaatgtcccacaatcgcaatttttaaaccttactaataaatatcgcgcttatgttgctggttatggtgctggcaaaacgtttattggttgcgttgctcagtgcttggacttctggaaatatcccggaataaatcaagcctatttcgcgcctaccttcccacagatacgggatatctattatccaaca

SEQ ID NO: 38251 - DNA, 260 bp, Unknown
  Description of Unknown: RightRegion for integrase A819 sequence
aatgaaaacgctaacgttgaatctgtaaaatcattttcggatatgtatggcaactcttaacccaaatcttgttgattactggtttgatggtaatccagaacccaagaactttataaaggttaggcaccgtgttttgtatggtggtcgatcttcatctaagtcgtgggaatttgccggaatggctgcttgtctggctaatcaatataagactcgatttctttgcgttcgtaggtatcagaacaaaattaaggagtccgttt

SEQ ID NO: 38252 - DNA, 260 bp, Unknown
  Description of Unknown: RightRegion for integrase A820 sequence
cgtctgatgcagcgcatcaccgcgatcgagctggaggaccggttcatccagatcgcaggcgagccattgctcgacaccgacgagggcgtcctcgtcatcgagttcggggacgggcgtcaccggaccttcaactgggaccacgtcgtgtccttctactacatgaccgaagaagagtcggctgcggctcgggaggaaaactgatgagcgacaccatcgcacaggcaaccctggacatcgacacgctcaagcggggcatcgag

SEQ ID NO: 38253 - DNA, 260 bp, Unknown
  Description of Unknown: RightRegion for integrase A821 sequence
acagctgaaatcctgaagtgccagcgaggaacgatcagaaaatatatggtgaagccatgagaaagcacgcaagaaagccagggcatgtcgagttctgcggaacctgggtaagcccgaaaggaaaacagatatacgaggcgctggaatccggcaagagctggcaggcttgcgctgatgagttcgggatctctctcgggacaatcagcggttacgcagagcgagctcggcgattcgggatagtgctgcgccagaacaagcga

SEQ ID NO: 38254 - DNA, 260 bp, Unknown
  Description of Unknown: RightRegion for integrase A822 sequence
gcaagcagtacgttgaacaggagaagacacagacagagatcgctgacgagtgtggagtagccgtgcctaccattagcgactggctcagcaagtgtggcatctcacgtgattgactggactggagtaacagcggtatgcaggcgatcagcacatccagtgagattgcgtgtgactaaccgcgggactgtagtatcaagagtgtgatgaccgacgcaggcacaatggatccgagcgacacctaccgcgacgaagactggctg

SEQ ID NO: 38255 - DNA, 90 bp, Unknown
  Description of Unknown: RightRegion for integrase A823 sequence
aatgccaatgtagaaaaagttaaatcattctcggagatgtatggcaactctagcacctaagcagtataattactgttgaggtgattaata

SEQ ID NO: 38256 - DNA, 260 bp, Unknown
  Description of Unknown: RightRegion for integrase A824 sequence
aatgaaaatgccaatgtagaaaaagttaaatcattctctgaaatgtatgcgggtaaataatgccaactctaaacccaaacttgcaagactattggtttgatggtgagccaaagcctgagaacttcatcaaggttaggcataggattctatatggcggtcgttcatcttctaagtcatgggagtttgctggaatggctgcgtgtcttgctaatcaatacaagacgcgcttcctttgtgttcgtagatatcaaaacaagatt

SEQ ID NO: 38257 - DNA, 260 bp, Unknown
  Description of Unknown: RightRegion for integrase A825 sequence
aatgaaaatgccaatgtagaaaaagttaaatcattctctgaaatgtacgcgggcaaataatggcaactctaaacccaaacttgcaagactattggtttgatggcgagccaaagccagagaactttatcaaggttaggcataggattctatatggcggtcgttcgtcatctaagtcgtgggagtttgccggaatggctgcgtgtcttgccaatcaatacaagacgcgctttctgtgtgttcgtagatatcagaacaagatt

SEQ ID NO: 38258 - DNA, 260 bp, Unknown
  Description of Unknown: RightRegion for integrase A826 sequence
gtggctgaaatcctgaagtgccagcgcggcactgtcagaaaatacatggcgaagccatgagcaagcacgcaagaaaaccagggtatgtcgagttttgcggaacctgggtaagcccgataggaaagcagatatacgaagcgctggtgtctgggatgtcgctgcgggatgtatcagacaagttcgagatctcaatggggacggcatctgggtatgcggagcgggctcgcaagtacggcgtcctcaagcgcaggacgaagcgc

SEQ ID NO: 38259 - DNA, 260 bp, Unknown
  Description of Unknown: RightRegion for integrase A827 sequence
gtggctgaaatcctgaagtgccagcgcagcaccgttagaaaatacatggtgaagccatgagcaagcacgcaagaaaaccagggtatgtagagttttgtggaacctgggtaagcccgagaggaaagcagatatacgaagcgctggaatccggaaagggcttgcaggcttgcgctgatgagttcgggatctctctcgggacaatcagcggttacgcaaagcgggcgcgtcgatttggaatagtcctgcgccagaacaagcgg

SEQ ID NO: 38260 - DNA, 260 bp, Unknown
  Description of Unknown: RightRegion for integrase A828 sequence
tacctgcgcgcggtggtgtggggcctggccagtgatccagcgcaggctctggccgcttcctcaaagcggccgcaggccggtggacccagcacccagcaattgctccaagaccaagtcggtcgaattcagtccgatatcgtgttggggctgattactaaagaggatggagagcgccagatcgcggcgctgaaggggggagcatgaagcagagttcgattctggcggaaactcgccatgagctgctggacgacattgcggca

SEQ ID NO: 38261 - DNA, 260 bp, Unknown
  Description of Unknown: RightRegion for integrase A829 sequence
ttgcaatgcccctgctgcgccgagcagttcccggtagaggtccaggcccgggccgcttcctcaaagcggccgcaggccggtggacccagcacccagcaattactcaaagaccaggtcggtcgagttcagtccgatatcgtgttggggctgattactaaagaggatgaagagcgccagatcgcggcactgaaggggggagcatgaagcagagttcgattctggcggaaactcgccatgagctgctggacgacattgctgca

SEQ ID NO: 38262 - DNA, 260 bp, Unknown
  Description of Unknown: RightRegion for integrase A830 sequence
gcggctgaaatcctgaagtgccagcgcggcactgtcagaaaatacatggtgaagccatgagcaagcacgcaagaaaaccagggtatgtcgagttttgcggaacctgggtaagcccgagaggaaagcagatatacgaagcgctggaatccggcaagggcttgcaggcttgcgctgatgagttcgagatctctctcgggacaatcagcggttacgcaaagcgggcacgtcgatttggaatagtcctgcgccagaacaagcgg

SEQ ID NO: 38263 - DNA, 260 bp, Unknown
  Description of Unknown: RightRegion for integrase A831 sequence
acaccggtgactccaggtttactacgctgcagattaagcgatttccgtgaggcgatttaaattataatccaatgaccatctaccaaaaatggattctcccattgaactctcattttctcccttcgtgccaacttaatcgtgaaatcagcactcctaatagtcaaatcatacccacaatcattaattttacggatggtgaatattttactaaattcataactaaaaaatttcggaagtagaatttcgattggataacaatc

SEQ ID NO: 38264 - DNA, 260 bp, Unknown
  Description of Unknown: RightRegion for integrase A832 sequence
aggcaggctgctgagttcaccgcgttgtcgaagaagttccgtcggctggaggcgtcgtgatgtgtgtatgtggacacaaccggtcctggcaccgctactcgtgggacaagttccggcaggtgtgggacaccggatgcaacgccaccaactatcacggtcctgctgggcatgaacgctgccgctgctccaaataccaagacaaggaagacgaatgatcactgatacgagggtcatcactgcgagggacgacgcgaaagccg

SEQ ID NO: 38265 - DNA, 260 bp, Unknown
  Description of Unknown: RightRegion for integrase A833 sequence
aagcaggctgctgagttcacagctctggtcaagaagttccgctggttggaggcttcgtgatgtgcgtgtgtggccataaccggtctttccaccgctaccagtgggacaagttccggggacggtgggacacgggttgtgaagccaccaactatcacggccctgctgggcatgaacgctgccgctgctccaaataccaagacaaggaagacgaatgatcactgatacgagggtcatcactgcgagggatgacgcgaaagccg

SEQ ID NO: 38266 - DNA, 260 bp, Unknown
  Description of Unknown: RightRegion for integrase A834 sequence
ggtctcgtcgcggcggtactggacgacgcggacgagaccggggggcgcgccgatggctgagccccgccgcttcaccgaagccgagatgctggcggccgcggcccgcgccatgggcaagatcgacgcccggggccggcttggcacgtcccgcatcagttacgaggagatcgaggccatggcggccacgctcctcgccctcggggtcgttccgatcccgcccacggccccggcgcccgaccggagcccctattccccgatca

SEQ ID NO: 38267 - DNA, 260 bp, Unknown
  Description of Unknown: RightRegion for integrase A835 sequence
aggcaggctgctgagttcaccgcgttgctgaagaagttccgccggctggaggcgtcgtgatgtgcaggtgtggtcacaaccggtcctggcacaggtatgcgtgggatcggttccgccaagtgtgggacaccagttgtgaagccaccaactatcacggccctgctgggcatgaacgctgccgctgctccaaataccaagacaaggaagacgaatgatcactgatacgagggtcatcactgcgagggatgacgcgaaagccg

SEQ ID NO: 38268 - DNA, 260 bp, Unknown
  Description of Unknown: RightRegion for integrase A836 sequence
aagcaggctgctgagttcagagctctggtcaagaagttccgctggttggaggcttcgtgatgtgcgtgtgtggccataaccggtcccggcaccgctaccagtgggacaagttccggggacggtgggacacgggttgtgacgccaccaactaccacggcccggccgggcatgaacgctgccactgctccgaatatcgagacaaggacgaaaactgatggttgttgatacacgggtgattaccgcgagggatgacgcgaaag

SEQ ID NO: 38269 - DNA, 260 bp, Unknown
  Description of Unknown: RightRegion for integrase A837 sequence
aggcaggctgctgagttcaccgcgttgctgaagaagttccgtcggctggaggcgtcgtgatgtgcaggtgtgggcacaaccggtcctggcacaggtatgcgtgggatcggttccgccaagtgtgggacaccagttgtgaagccaccaactatcacggccccgccgggcatgaacgctgccactgctccaaatatcaagacaaggacgaaacatgatcatcgatacgaaatcccaggcggatatgcggccgatctggcagc

SEQ ID NO: 38270 - DNA, 260 bp, Unknown
  Description of Unknown: RightRegion for integrase A838 sequence
aagcaggctgctgagttcagagctctggtcaagaagttccgctggttggaggcctcgtgatgtgcgtgtgtggacacaacaggtcccggcaccgctaccagtgggacaagttccggggacggtgggacacgggttgtgacgccaccaactaccacggccccgccggacatgaacgctgccactgctccgaatatcgagacaaggacgaaaactgatggttgttgatacacgggtgattaccgcgagggatgacgcgaaag

SEQ ID NO: 38271 - DNA, 260 bp, Unknown
  Description of Unknown: RightRegion for integrase A839 sequence
atagaaatagaacaaaaaccagttagaagaatagggtttcttattgaagagaatgaataattctcttttctttttgtagttctttattaatttatactatgttaaaaaaatgaatattttgttaaaactatgtgactaaatatatattatttattatctcaattttacagttcaagctagaaaatacatcaaaaaaaagatagttgaaaaataaaaataaaaaaattaaaaataactgttataaaaagtgatagttatgt

SEQ ID NO: 38272 - DNA, 260 bp, Unknown
  Description of Unknown: RightRegion for integrase A840 sequence
aagcaggctgctgagttcagagctctggtcaagaagttccgctggttggaggcgtcgtgatgtgcgtgtgtggccataaccggtctttccaccgctaccagtgggacaagttccggggacggtgggacacgggttgtgacgccaccaactaccacggccccgccggacatgaacgctgccactgctccgaatatcgagacaaggacgaaaactgatggttgttgatacacgggtgattaccgcgagggacgacgcgaaag

SEQ ID NO: 38273 - DNA, 260 bp, Unknown
  Description of Unknown: RightRegion for integrase A841 sequence
aggcaggctgctgagttcaccgcgttgctgaagaagttccgtcggctggaggcgtcgtgatgtgcaggtgtgggcacaaccggtcctggcacaggtatgcgtgggatcggttccgtcaagtgtgggacaccagttgtgaagccaccaactatcacggccctgctgggcatgaacgctgccgctgctccaaataccaagacaaggaagacgaatgatcactgatacgagggtcatcactgcgagggatgacgcgaaagccg

SEQ ID NO: 38274 - DNA, 260 bp, Unknown
  Description of Unknown: RightRegion for integrase A842 sequence
aggcaggctgctgagttcaccgcgttgctgaagaagttccgtcggctggaggcgtcgtgatgtgcaggtgtgggcacaaccggtcctggcacaggtatgcgtgggatcggttccgccaagtgtgggacaccagttgtgaagccaccaactatcacggccctgctgggcatgaacgctgccgctgctccaaataccaagacaaggaagacgaatgatcactgatacgagggtcatcactgcgagggatgacgcgaaagccg

SEQ ID NO: 38275 - DNA, 260 bp, Unknown
  Description of Unknown: RightRegion for integrase A843 sequence
aagcagatcgccgaatatcagtcgttgatggtgcggttccgccggctggaggcgtcgtgatgtgcaggtgtgggcacaaccggtcctggcacaggtatgcgtgggatcggttccgccaagtgtgggacaccagttgtgaagccaccaactatcacggccctgctgggcatgaacgctgccgttgctccaaataccaagacaaggaagacgaatgatcactgatacgagggtcatcactgcgagggatgacgcgaaagccg

SEQ ID NO: 38276 - DNA, 260 bp, Unknown
  Description of Unknown: RightRegion for integrase A844 sequence
aagcagatcgccgaatatcagtcgttgatggtgcggttccgccggctggaggcgtcgtgatgtgcaggtgtgggcacaaccggtcctggcacaggtatgcgtgggatcggttccgccaagtgtgggacaccagttgtgaagccaccaactatcacggccctgccgggcatgaacgctgccgctgctccaaataccaagacaaggaagacgaatgatcactgatacgagggtcatcactgcgagggatgacgcgaaagccg

SEQ ID NO: 38277 - DNA, 260 bp, Unknown; identical to SEQ ID NO: 38274
  Description of Unknown: RightRegion for integrase A845 sequence

SEQ ID NO: 38278 - DNA, 260 bp, Unknown
  Description of Unknown: RightRegion for integrase A846 sequence
aagcaggctgctgagttcagagctctggtcaagaagttccgctggttggaggcttcgtgatgtgcgtgtgtgggcacaaccggtctttccaccgctaccagtgggacaagttccgcggcaggtgggacacgggttgtgacgccaccaactaccacggccccgtcgggcatgaacgctgccgctgctcgaaataccaagacaaggaagacgaatgatcactgatacgagggtcatcactgcgagggatgacgcgaaagccg

SEQ ID NO: 38279 - DNA, 260 bp, Unknown; identical to SEQ ID NO: 38274
  Description of Unknown: RightRegion for integrase A847 sequence

SEQ ID NO: 38280 - DNA, 260 bp, Unknown
  Description of Unknown: RightRegion for integrase A848 sequence
aagcaggctgccgagttcacagctctggtcaagaagttccgctggttgggggcttcgtgatgtgcgtgtgtggccataaccggtctttccaccgctaccagtgggacaagtttcgcggcaggtgggacacgggttgtgacgccaccaactaccacggcccagccgggcatgaacgctgccactgctccgaatatcgagacaaggacgaaaactgatggttgttgatacacgggtgattaccgcgagggacgacgcgaaag

SEQ ID NO: 38281 - DNA, 260 bp, Unknown
  Description of Unknown: RightRegion for integrase A849 sequence
aggcaggctgctgagttcaccgcgttgtcgaagaagttccgtcggctggaggcgtcgtgatgtgtgtatgtggacacaaccggtcctggcaccgctactcgtgggacaagttccggcaggtgtgggacaccggatgcaacgccaccaactaccacggccccgtcgggcatgaacgctgccgctgctcgaaatatcaagacaaggaagacgaatgatcactgatacgagggtcatcactgcgagggatgacgcgaaagccg

SEQ ID NO: 38282 - DNA, 260 bp, Unknown
  Description of Unknown: RightRegion for integrase A850 sequence
aagcaggctgccgagttcacagctctggtcaagaagttccgctggttggaggcttcgtgatgtgcgtgtgtggccataaccggtctttccaccgctaccagtgggacaagttccgcggcaggtgggacacgggttgtgacgccaccaactatcacggccccgccgggcatgaacgctgccactgctccgaatatcgagacaaggacgaaaactgatggttgttgatacacgggtgattaccgcgagggacgacgcgaaag

SEQ ID NO: 38283 - DNA, 260 bp, Unknown
  Description of Unknown: RightRegion for integrase A851 sequence
ctctccgagtgcggacggtggggccgattccttgaccgaacccgagagaggtccgcatgacactcgacgcccccgagatccctgacggacagcccacgtgggcgcgtgtgcggcacggcgcaggatgcgccctgccgcgccgcctggacgacggcacgatcggcgtcctgccgaccaccgtcccgatccgcctcgagttcgaccgctacgacaccgggcccgacggcacccgccgccaggtgtggatcgtccctgacggc

SEQ ID NO: 38284 - DNA, 260 bp, Unknown
  Description of Unknown: RightRegion for integrase A852 sequence
actcgcaagcagatcgacgagtggcgccgcgagcgccggctgtgggcggacgcgtcatgaactcgatcaactcgacggtgttcgtgcctggtcacaaccagttgaagcggtgccgcggctgctcggcgctcatcttcttcgccgtgacccgcgacggccggtcgatcccggtcgaccacaagccgcgccccgacgggaatctcgcggtcgcgccgctgcaggacggcgagaaggcgccacgcgcgaccgtcgtccgaccc

SEQ ID NO: 38285 - DNA, 260 bp, Unknown
  Description of Unknown: RightRegion for integrase A853 sequence
acccgcaagcagatcgacgagtggcgccgcgaggtccggctgtgggtggacgcgtcatgaactcgatcaactcgacggtgttcgtgcctggccacaaccagttgaagcggtgccgcggctgctcggcactcatcttcttcgccgtcacccgcgacggccggtcgatcccggtcgaccacaaaccccgtcccgacggcaacctcgcggtcgcgccgctgcaggacggcgagaaggcgccccgcgcgaccgtcatccgcccc

SEQ ID NO: 38286 - DNA, 260 bp, Unknown
  Description of Unknown: RightRegion for integrase A854 sequence
acccgcaagcagatcgacgagtggcgccgcgaggtccgactgtgggcggacgcgtcatgaactcaatcaactcgacggtgttcgtgcccggacacaaccagttgaagcggtgccgcggctgctcggcactcatcttcttcgccgtcacccgcgacggccggtcgatcccggtcgaccacaaaccgcgccccgacgggaacctcgcgatcgccccgctgcaggacggcgagaaggcgccacgcgcgaccgtcatccgacct

SEQ ID NO: 38287 - DNA, 260 bp, Unknown
  Description of Unknown: RightRegion for integrase A855 sequence
acccgcaagcagatcgacgagtggcgccgcgaggtccggctgtgggtggacgcgtcatgaactcgatcaactcgacggtgttcgtgcctggccacaaccagttgaagcggtgccgcggctgctcggcactcatcttcttcgccgtcacccgcgacggccggtcaatcccggtcgaccacaaacccgccgcggacggaaacctcgcggtcgcgccgctccaggacggcgagaaggcgccccgcgcgaccgtcatccgaccc

SEQ ID NO: 38288 - DNA, 260 bp, Unknown
  Description of Unknown: RightRegion for integrase A856 sequence
accacggcatccggccggacaccttcgacccggccgacaggatcatccaggccccgcgcgccgtctgcaggttcaccgcccgccgccagcgctacggaatcagccactagacagcaatagggcccctgaccgtcccaagtcaggggccctaccagccaccagcacaacccgcatactcagaatagaggaggacagagaaaatgaccagatggctacagatcaaagacgattatctcgagctccacgccgaagggatcacc

SEQ ID NO: 38289 - DNA, 260 bp, Unknown
  Description of Unknown: RightRegion for integrase A857 sequence
acccgcaagcagatcgacgagtggcgccgcgaggtccggctgtgggtggacgcgtcatgaactcgatcaactcgacggtgttcgtgcccgggcacaaccagttgaagcggtgccgcggctgctcggcgctcatcttcttcgccgtgacccgcgacggccggtcgatcccggtcgaccacaaaccgcgtcccgacggcaacctcgcggtcgcccctctgcaggacggcgagaaggcgccccgcgcgaccgtcatccgaccc

SEQ ID NO: 38290 - DNA, 260 bp, Unknown
  Description of Unknown: RightRegion for integrase A858 sequence
acccgcaagcagatcgacgaatggcgccgcgaacgccgactgtgggcggccgcgtcatgaactcgatcaacgcgacggtgttcgtgcccggccacaaccagttgaagcggtgccgcggttgctcggagctcatcttcttcgccgtgacccgcgacggccggtcgatcccggtcgaccacaaggcccgcgccgacgggaacctcgcgatcgccccgctgcaggacggcgagaaggcgccgcgcgcgaccgtcgtccgacct

SEQ ID NO: 38291 - DNA, 260 bp, Unknown
  Description of Unknown: RightRegion for integrase A859 sequence
acccgcaagcagatcgacgagtggcgccgcgaggtccggctgtgggtggacgcgtcatgaactcgatcaactcgacggtgttcgtccccgggcacaaccagttgaagcgctgccgcggctgctcggcactcatcttcttcgccgtcacccgcgacggccggtcgatcccggtcgaccacaaaccgcgtcccgacggcaacctcgcgatcgccccgctgcaggacggcgagaaggcgccacgcgcgaccgtcatccgaccc

SEQ ID NO: 38292 - DNA, 260 bp, Unknown
  Description of Unknown: RightRegion for integrase A860 sequence
ctggcggcgttgcacgtcgagcaggagaaacggtacctcctcgccgaagtggatcggctctgccagggcctgggcatcgagcatccagaacaggcggccggcctggaacagctgccgaaaggatggcggcggcagcgtccaatcctcaaggccctggtggaaacgctccaggcggccgcagatagcaagcggaggtaataatgaaggagatccgttcgcagcagatccgccgccggaacaacatgctcagcgagctggcc

SEQ ID NO: 38293 - DNA, 260 bp, Unknown
  Description of Unknown: RightRegion for integrase A861 sequence
ctggcagcgctgcacgtcgagcaggagaaacggtacctcctcgccgaggtggatcggctctgccagggcctgggcattgagcatccagaacaggcggccggcttggaacagttgccgaaaggatggcggcggcagcgtccaatcctcaaggccctggtggaaacgctccaggcggccgcagatagcaagcggaggtaataatgaaggagatccgttcgcagcagatccgccgccggaacaacatgctcagcgagctggcc

SEQ ID NO: 38294 - DNA, 260 bp, Unknown
  Description of Unknown: RightRegion for integrase A862 sequence
gatcgtaaacagtgcgctgagtggcggtccatcatccgcatggaaagggccatcgcatgactgacttgtcgtttctgctagctcccgcagaagaggggcggcatgcgtggcgggacaaagcgttgtgcgcccaggttgatgtgggggacatgtttttccccggtaagggggagagcgcgaagccggcgaagaggatttgcgcccggtgtgaggtgcgggccgaatgcttggagttcgcgttggcgaatcgtgagcactat

SEQ ID NO: 38295 - DNA, 260 bp, Unknown
  Description of Unknown: RightRegion for integrase A863 sequence
caagtggaaatttcagaaacaccattgttcgttgatgatatcggtgatgatgatggttaagaaaaaactatcagaattattaccgaaaaaatttcattcggtatggagagcaactcttaactcggacatactgaatattgtttgtaagggtggacgtggttctggtaaatcatcagatattgcacatattattactcaattgcttatgagatatgctgtcaatgcggttggcattcgatatgttgataatacattagaac

SEQ ID NO: 38296 - DNA, 260 bp, Unknown
  Description of Unknown: RightRegion for integrase A864 sequence
gaccgccggcagtgcgctgaatggcgagtgatcgcccgcatggaaagagctatcgcatgaccatcatcgacctgtcattcatgctcgcccctgttgaggacaagcacgcgtggcgtgaccaagcgttgtgctcccaggtcgatcccgagctgttcttccccgaaaagggagtaaacgcgaaacccgcaaagcggatctgcggtatgtgcgacgtccgggacgaatgccttcagtgggcgctggacaacaacgaacagttc

SEQ ID NO: 38297 - DNA, 260 bp, Unknown
  Description of Unknown: RightRegion for integrase A865 sequence
gaccgccggcagtgcgctgaatggcgagtgatcgcccgcatggaaagagctatcgcatgaccatcatcgacctgtcattcatgctcgcccctgttgaggacaagcacgcgtggcgtgaccaagcgttgtgctcccaggtcgatcccgagctgttcttccccgaaaagggaggaaacgcgaaacccgcaaagcggatctgcggtatttgcgacgtccgggacgaatgccttcagtgggcgctggacaacaacgaacagttc

SEQ ID NO: 38298 - DNA, 260 bp, Unknown
  Description of Unknown: RightRegion for integrase A866 sequence
gaccgccggcagtgcgctgaatggcgagtgatcgcccgcatggaaagagctatcgcatgaccatcatcgacctgtcattcatgctcgcccatgttgaggacaagcacgcgtggcgtgaccaagcgttgtgctcccaggtcgatcccgagctgttcttccccgaaaagggaggaaacgcgaaacccgcaaagcggatctgcggtatgtgcgacgtccgggacgaatgccttcagtgggcgctggacaacaacgaacagttc

SEQ ID NO: 38299 - DNA, 260 bp, Unknown
  Description of Unknown: RightRegion for integrase A867 sequence
gatcgtaaacagtgcgctgagtggcggtccatcatccgaatggaaagggccatcgcatgaccctgacagatttgaccctcaagctcgccgcagcagtggaggaaaagcatgcgtggagagacctggcacggtgcgccgaagtggaccccgaaatgttcttccccgagaagggtggcagcgcgaagccagccaaacggatctgcagccggtgcgaagtcgcggatgagtgcctggagtgggctctggcgaatcgcgagaac

SEQ ID NO: 38300 - DNA, 260 bp, Unknown
  Description of Unknown: RightRegion for integrase A868 sequence
gatcgtaaacagtgcgctgagtggcggtccatcatccgcatggaaagggccatcgcatgaccctgacagatttgaccctcaagctcgccgcagcagtggaggaaaagcatgcgtggagagacctggcacggtgcgccgaagtggaccccgaaatgttcttccctgagaagggtggaagcgcgaagccagccaaacggatctgcagccggtgcgaagtcgcggatgagtgcctggagtgggctctggcgaatcgcgagaac

SEQ ID NO: 38301 - DNA, 260 bp, Unknown
  Description of Unknown: RightRegion for integrase A869 sequence
tattgtgtaaaaatgtgtggtaaagaacgttgtggccatgcattatcatctcctagaaatccttacaatagatattgttttgtagattctgaaggatggattttagaacctggaatccaagaagaagcttgtatatatatgtgttaatattggactaacataaaaattgaatattttaattataaatagtgtcaattaaaatgacaccaaatattattattatcgttgataataaaatggaaaatactaatgcactggaa

SEQ ID NO: 38302 - DNA, 260 bp, Unknown
  Description of Unknown: RightRegion for integrase A870 sequence
tattgtgtaaaaatgtgtggtaaagaacattgtagccatgcattatcatctcctagaaatccttataatagatattgttttgtagattctgaaggatggattttagaacctggaatccaagaagaagcttgtatatatatgtgttaatattggactaacataaaaattgaatattttaattataaatagtgtcaattaaaatgacaccaaatattattattatcgttgataataaaatggaaaatactaatgcactggaa

SEQ ID NO: 38303 - DNA, 260 bp, Unknown
  Description of Unknown: RightRegion for integrase A871 sequence
caatattgtgtaaaaatgtgtggtaaagaacattgtagccatgcattatcatctcctagaaatccttataatagatattgttttgtagattctgaaggatggattttagaacctggaattcaagaagaatcttgtatgtatatgtgttagagctatcaaaaaaaatttgaatattttaattataaatagtgtcaattaaaatgacaccaaatattattattatcgttgataataaaatggaaaatactaatgcactggaa

SEQ ID NO: 38304 - DNA, 260 bp, Unknown
  Description of Unknown: RightRegion for integrase A872 sequence
acccgtgagcagtccatcgagtgggtttcgttcctccgccgctatcggggtgtcgcatgaccacctggaagaaactcaccccggagcagatcgaacggatcgtgtcgttgacgtgggacggatggtctatcgaacagatcgccaccgacattgggtgcacgtcgcgcacggtgacccgggtgagggggaaacacaacatcacccgtgggcgtgctttggatccgatccctgttgaaaagttggctgtcgctgcacgtctc

SEQ ID NO: 38305 - DNA, 260 bp, Unknown
  Description of Unknown: RightRegion for integrase A873 sequence
actcgtgagcagtcgattgagtggatttcgttcatccgccgctacaggggtgtcgcatgaggcggggcgcgaaactcccggagtgggtggtggagcggatcgtggcgttgtcgtggaacggctggaccaccggcgacatcgccaaagaagtcggatgctccgaccgcacagtgtcacgggtgagggtgcggcacggcatcagccgcggcgaagcccacgaccccatccctgaacatgtcctggcccaggcggcccgcctg

SEQ ID NO: 38306 - DNA, 260 bp, Unknown
  Description of Unknown: RightRegion for integrase A874 sequence
actcgtgagcagtcgattgagtggatttcgttcatccgccgctacaggggtgtcgcatgaggcggggcgcgaaactcccggagtgggtggtggagcggatcgtggcgttgtcgtggaacggttggaccaccggcgacatcgccaaagaagtcggatgctccgaccgcacagtgtcacgggtgagggtgcggcacggcatcagccgcggcgaagcccacgaccccatccctgaacatgtcctggcccaggcggcccgcctg

SEQ ID NO: 38307 - DNA, 260 bp, Unknown
  Description of Unknown: RightRegion for integrase A875 sequence
actcgtgagcagtcgattgagtggatttcgttcatccgccgctacaggggtgtcgcatgaggcggggcgcgaaactcccggagtgggtggtggagcggatcgtggcgttgtcgtggaacggttggaccaccggcgacatcgccaaagaagtcggatgctccgaccgcacagtgtcacgggtgagagtgcggcacggcatcagccgcggcgaagcccacgaccccatccctgaacatgtcctggcccaggcggcccgcctg

SEQ ID NO: 38308 - DNA, 260 bp, Unknown
  Description of Unknown: RightRegion for integrase A876 sequence
actcgtgagcagtcgattgagtggatttcgttcattcgccgctacaggggtgtggcatgaggcggggcgcgaaactcccggagtgggtggtggagcggatcgtggcgttgtcgtggaacggttggaccaccggcgacatcgccaaagaagtcggatgttccgaccgcacagtgtcacgggtgagggtgcggcacggcatctcccgcggcgaagcccacgaccccatccctgaacatgtcctggcccaggcggcccgcctg

SEQ ID NO: 38309 - DNA, 260 bp, Unknown
  Description of Unknown: RightRegion for integrase A877 sequence
actcgtgagcagtcgattgagtggatttcgttcatccgccgctacaggggtgtcgcatgaggcggggcgcgaaactcccggagtgggtggtggagcggatcgtggcgttgtcgtggaacggctggaccaccggcgacatcgccaaagaagtcggatgctccgaccgcacagtgtctcgggtgagggttcggcacggcatctcccgcggcgaagcccacgaccccatccctgaacatgtcctggcccaggcggcccgcctg

SEQ ID NO: 38310 - DNA, 260 bp, Unknown
  Description of Unknown: RightRegion for integrase A878 sequence
tgccatttccttggagatttttacttgtgatttagtcattggaatcagtcctgttaaggctccccaccacaatggctaaaaggtacaggacagaccggggagcacgttaagtataaccacttcaaaataattaaacaaatggcttgattttacccgattcagtgactaagattaattcaacttaaacaggaaggataatcatgaaattcaccgacacaccaacaaccacgcttgatgagttacttaactcaacgcgtggc

SEQ ID NO: 38311 - DNA, 260 bp, Unknown
  Description of Unknown: RightRegion for integrase A879 sequence
agagaagataagggttatggttatattgaaaagttattagcaatagttaaagagagtcgacagaagaatgaggaaactatgaaaagatacaacacaataaaaaaattgatcttttgatagtctgttatatccttttcatatctattgtgattgataagtaaagtgaccctttttaactataactttttataataaaattcatgtcgaaatccattttttctaaggagatggatgcatttgccattgatattctgattaga

SEQ ID NO: 38312 - DNA, 260 bp, Unknown
  Description of Unknown: RightRegion for integrase A880 sequence
tatgatgtggctgtttccacgctttataagaagtttccggcgtcatcatttcaatcctaaaccttggtttaagagaactcggtaccagcggtgaaaagatccccctgttgagcacggctaacacatggagttcacgccagactttcaacggcgggatcaccggggcgctggcagggaatgccgatactgcaacgaaattgaaaaccaaaaggtcgcttcaagttgacctccaaagtgataacgccatcgactttgatggt

SEQ ID NO: 38313 - DNA, 260 bp, Unknown
  Description of Unknown: RightRegion for integrase A881 sequence
acggtggcactttctgcatctcatgccttgaaaatggaagctctccagagtttagcatagccaaaagaaaatgattaaatttacagcgcaggagcgggagatgcaaatctcccatctgtgtaaggatagcctttactctttttctgggtgggatggtccttacaagtttggcaaatcaaaagtgctcatctcctgtaaaaagcatggttgtcattctttgcatctaaatagtgttctacacaatggttcaagatgtccgg

SEQ ID NO: 38314 - DNA, 260 bp, Unknown
  Description of Unknown: RightRegion for integrase A882 sequence
cttctaaatgggatactcaaagaagagaaggaagttgaaagcaatatcccacaatggcagacggacgcccttaaaactttagtgaagatgggagtcatcacagatgaagcctactggtctaaaaagatggaagacaaaattactgtcggtgaggtcatcggattactcggtaaaatgactaagtaaatggaggggtgtcgatggatacgtttgaaagtgaacttacacttgatatgataagtgaagggatgtaccgtgac

SEQ ID NO: 38315 - DNA, 260 bp, Unknown
  Description of Unknown: RightRegion for integrase A883 sequence
ggtgatgcggaacaaaagacaccgaatccgcagtcagacgcagacgagtacaagaaatgaaacaggtagaaatcaaaccaatcaaagagacgagcgacgattacgaggagctggtcgaaatcatttcggattacttcaaagaggaaatctatttgcctcttttgaaaatcattgatgctccgaaatcggttttgaattctcgcgaggatttgatttctgcaatttcttctggacgtatcacttattatcgcggagagttt

SEQ ID NO: 38316 - DNA, 260 bp, Unknown
  Description of Unknown: RightRegion for integrase A884 sequence
ctggagggacagatgagccttctcgactacggcgacgagccggaaaacactacgttctaagacaacatttctaagaagcagtacatatataaggttcctgaaagggacggtaaaataagactatgagcatagctcatagtcttatttttatatccaaaggaggacaccaaacatgagcatggagatcatccagagcgcggcgaccgagctgctggtcaacgttgcgctcgccgtgctggccctcgccggggcctacgcgg

SEQ ID NO: 38317 - DNA, 260 bp, Unknown
  Description of Unknown: RightRegion for integrase A885 sequence
ggatccaacgcgcgcttgatccgatagaaaaccgagacgccagggttgtaccaggtcgaatcctcaccgagacgtgtaaacccagcgagcgagttggaactcatactctgcgcaaccaacccgaccacgggccttgaccccgcgggttggacacgcttgatcctggtctcagaccagggaaagcgagaagatctaacccgatggcaaagaaaaattactccgaagagttccgccgcgacgcagtcgagctgtaccgcgac

SEQ ID NO: 38318 - DNA, 260 bp, Unknown
  Description of Unknown: RightRegion for integrase A886 sequence
cgtagatcacgagataataagaaaaatatattggataatcaaccggaaattaatatgtaatatattggaaaaattgataaatttatttattataaaattataacaaataaataataatattattaaccaaatggaatgttatgaatgtggtaatatgagtactaacattgtattatattataatatcaaacttaaaatatatatcggatcagaaaattataataataataatcatcaaaattttaaaccaatttgtgaaa

SEQ ID NO: 38319 - DNA, 260 bp, Unknown
  Description of Unknown: RightRegion for integrase A887 sequence
tatcgcacgtaataaccgctttgtctacttgtttccagagatgtatgctaacatcggaaatataaaaatggtagaactcggatacgggcatagcgtacaaaaggtcttttattacgacccaaacacgtgtgcatattgtttgtttacgttcaccaataaaagtaacatcgtgaatctattcgaagctaaaaggtaagaaaatgggtaaacgttggacagataaagaagatgaaacgttgctgcttattcttagtacatca

SEQ ID NO: 38320 - DNA, 260 bp, Unknown
  Description of Unknown: RightRegion for integrase A888 sequence
ataaaataccacaatttgaaggatttttcaaagtatacttgaatcaattatcagaaaaaaattatcacgaatattgttttacagataatgaaggatatattttacaaccaggtatcaaaagagaatatattaattaaaaaaattgaaattttaaagattaaaattgtttattaatcctattttattattatagctccatcatggagaaagttattattatttatcatgagcatttgaattcttttgaagaatctgcagtc

SEQ ID NO: 38321 - DNA, 260 bp, Unknown
  Description of Unknown: RightRegion for integrase A889 sequence
ccatgcattggcatctcctagaaatccttacaatagatattgttatgttgattctgaaggatggattttggaacctggtatacaagaagaagcttgtatgtatatgtgttaatattggactagcataaaaattgaatattttaatcataaataatatcatttgaaaatgttttattatcaatattattattgataataaaatggaaaatcctacaacgctagaaattaatgccgctattatattggttaaattgcgtcgt

SEQ ID NO: 38322 - DNA, 260 bp, Unknown
  Description of Unknown: RightRegion for integrase A890 sequence
aggaaacaaattaatacttggtttcaaaataaacgctcatacggcaaacaacaaaaatgagcagtaaaaaattgattattatatgttaatatatatattgacatattataaaaaatcattaaacatatcataataaaatggaatgttattattgtgaaactaataaaaataatatatgtttttattatggtcttaaacctattgtttatttagaaagtaaacattataatccacaaattcataaaaattataaaccgata

SEQ ID NO: 38323 - DNA, 260 bp, Unknown
  Description of Unknown: RightRegion for integrase A891 sequence
gctttaaggcgagttttcgaatcttaagtttatctttctgtttctgctcctctcgtcgtcgtttcttctctgctgccttttccgctttttcgcgttctttgcttcgtcgttcgagtgctatcttggtttgaagtggcacactgaatttggccacctgaacagaggtgatatgctcacctcagaacaacacaggtgctccaatgaaaaaaagaaattttagcgcagagtttaaacgcgaatccgctcaactggttgttgac

SEQ ID NO: 38324 - DNA, 260 bp, Unknown
  Description of Unknown: RightRegion for integrase A892 sequence
gttcgaacgatactaaatgaatatgctttggatcagaaccagctcgcgttgtttgactaacgcgagcttatttattgcaagcgactattttacctcggtgtttcaaggaaaaaatgaatattatgcgtatgtaggaaaatttttctatgggttaagcttctgtcagatagtaatgacaggagcttttttattttgcttgattagggggtggaatcagttggaatgggaacaagcatttaacatcatcatcatgacgatga

SEQ ID NO: 38325 - DNA, 260 bp, Unknown
  Description of Unknown: RightRegion for integrase A893 sequence
aatgcggctttctacgatcaaaatcgtagacagtttagccccggatgcactcgtactcattctcaactggcgctagcacaaggttttaccactcccattaattaaattttttaatcacataaaatttttcatgtaattaaaaaaaaattgatttttgaatgattaaaataacacatttattaaaatttaataataatacaatgaataaaatcattattatatattgcaatcattttgattcttttgaagaatcggttgtc

SEQ ID NO: 38326 - DNA, 260 bp, Unknown
  Description of Unknown: RightRegion for integrase A894 sequence
ttatgaaagattgggtttacttctacattgagcatactattaaatatggtaagccgtatcgacaaagaaggaattaaatataagaagtgcggtgtagtgctgacctgtttagagccaaagtatggacatacttatgatgtgtgctgaaaaaacaggaggttttaacttggtaaactaaacacactcatcaggagtttaccatgagcaagaaacacaagacttacaccacagaatttaaagctgaagccatcaaattaatt

SEQ ID NO: 38327 - DNA, 260 bp, Unknown
  Description of Unknown: RightRegion for integrase A895 sequence
gccaaccccaaggcaggtattaccgcgcatctctagtgtcatcttaaccccttccgggtaagaataattaccgcccaatactacaacctggctgacggggtactggctggaattattgttaaaattagagttaataatgaatcgccacaggtttaacagacacctcagagtcatttaagatgacttaaagagaggtgcccatgagcggtaagcgttatcccgaagagtttaaaattgaagcggtaaaacaggttgttgat

SEQ ID NO: 38328 - DNA, 260 bp, Unknown
  Description of Unknown: RightRegion for integrase A896 sequence
gaaataacgccggatgagcagaaagaacctgtggcggccattgcgccgtctttatattagcgccagcgtatcagttccgacaaaacaatctcaatccatcccaataattagcagggagaacaatcgaaaaagcgcaagagaaagaaggattacttgtttttttaggaatgaaatccgttaatgactatactcttaatattcttggccaaaatgtttcaagagtcacaacggggaaaaaaccgtatgatttattattcctg

SEQ ID NO: 38329 - DNA, 260 bp, Unknown
  Description of Unknown: RightRegion for integrase A897 sequence
atcaacttcgctgatggccgattcgcaatgatgcgcggcgagccgatgctcgacgcctccgacggagtcctgacgatcgcactcgatgacggcacgttccggacgtgcaacttcgaccacgtcgtctactacaccaccctcaccgaggacgacctcaagcacctcttcggtgatgacgaggaagaaggagccggatacctgtgaacgcaacagaactactggatcagctccgcgagaaggtcgaagccctcgaggaggag

SEQ ID NO: 38330 - DNA, 260 bp, Unknown
  Description of Unknown: RightRegion for integrase A898 sequence
aaaaaatacaatgagatatgtggtcttctaaatcaggcgataaaacaaatgccagaatagattagcaaatcatcggattttgttacgacaaattaatgaaaaaaaagatggtagttattacttgcgaagatctcgctaaaatgcttttagagcttcctgattctgcaaaacccaaagatatagaatcaaaattgtttaatcaaaaaggtatcgaaaaaaaccagacggccaagtacatccacagctgtgtttgcaaaatg

SEQ ID NO: 38331 - DNA, 260 bp, Unknown
  Description of Unknown: RightRegion for integrase A899 sequence
gaaatgcaattagatatcctaaagcaagcggcggtgattatggcacaaaaagggaaataatcactgctaataaggataactatagcatttcagccatgtgtcgttggttgaacattcctcgttctagctattactacaaggctgttaaaccagtctctgaagcggaaacttgaagaaaatatcaaagctatttttctcgaaagtaaggccagatacggatccagaaaaatcaaaatatgcttgaataacgaaggtattac

SEQ ID NO: 38332 - DNA, 260 bp, Unknown
  Description of Unknown: RightRegion for integrase A900 sequence
gtatccgcttctgcgcttgcaaaatggatcaaacagtattctcaagtcagactcgaagataattctgtacttactgccaagcaaatacaagagttacaaaaacgtaatgcgcagcttgaagaggagaaccttgaatcggttacactaaactagacagaatttataaagtgttctacactaaagaaaacaggagaacagatatgtctagaaaaatacgtcgccacttcaccgatgattttaagcaacaaatcgttgacttg

SEQ ID NO: 38333 - DNA, 260 bp, Unknown
  Description of Unknown: RightRegion for integrase A901 sequence
tactggacgccccgggccaaggacgagcccaagatagaactgtccgaggatcagggctagtcacccccacgagcctgccgcagccagcggcaggctttccccttgcgccgatccttgcgcccaaggtaggctacctatcccgacacgccgacgtcgtacttccctaacccggggtagtacgatgttcgcatgagtgctacccccgaagcccccgcagttgccaccgagtccgagtggggcagcccgacgttcaaaacgtt

SEQ ID NO: 38334 - DNA, 260 bp, Unknown
  Description of Unknown: RightRegion for integrase A902 sequence
gcccggaaactagccttgtcccggcagcgggttagtgaaataattaagaagtttgcgtaacccactccctaacccgtctcccaagcgggttttttgattcctaaattctttcctcaaaccccttgacatcctaaaggaggtttgatatattagaagtatgaacttgaggagaacgtttatgtttatagttaaagaagggaacagaaagcacggtgttggctaccagatatgggaaggaaacttgttggtacgcgttggta

SEQ ID NO: 38335 - DNA, 260 bp, Unknown
  Description of Unknown: RightRegion for integrase A903 sequence
atcgctcaaggggcaccggaggcgttacgccgggaagcggtcgaactgctgttgaagtaatcaggggagcacaacaggatgatacaactacctccagcgttggaggctatgaaagccttcccgcaattcatgatttacaagctcgtaccgcgtcagggcacaccgggtaagatggacaagctgccgtgcagtctcgacggcaaacccgtgtcagcgcacgcctcagagcactgggttgacgctgacacagcttgtttcac

SEQ ID NO: 38336 - DNA, 260 bp, Unknown
  Description of Unknown: RightRegion for integrase A904 sequence
ttcaacaaaattttgtattttcctgaatttgacctctttccgtaatatttgtttttgtaaggggctttctaagaccccacctaatttaaaactccacaaaccttattttaattttacaaaaaaatggatgggctacactaagttggacagaaaaattaaggctagtagaataacatattattatagggaacggatctattatgccaagacaaagacgtacattcacagatgatttcaagagacaaatggtccaacttcac

SEQ ID NO: 38337 - DNA, 260 bp, Unknown
  Description of Unknown: RightRegion for integrase A905 sequence
aacgaaccaaaggtagatatccaagaggttatcgatgccattaataaagtccgactataagtttcgtatcctgttcaaatacgaacatgggtacaactacctaatggaagacaaagcctatttaatttttggtgtcatcaaataccaaggcgtcaagttatttatgcgtcgtccaaaggaaattcgcatcgaccctaactacccaattagtgtggatgaggaggctagagacttattcaagcaaatgtctttcgcttgtc

SEQ ID NO: 38338 - DNA, 260 bp, Unknown
  Description of Unknown: RightRegion for integrase A906 sequence
atccttcaactgagggattttgcttatgttaataaaaacgggtatatttattattgtaattaaattgaattgaatggaggctttctctcatgagcagaattaatgaagtaagagaatttattgaaaagctgatgctagtatagttccatggacacaacttagttaagtgttaaaatgttactaagaaaggttgtgtccatatgggaaacaaaaatacaggcaaaaaatataacgaagattttaaaaagatgatcgttgat

SEQ ID NO: 38339 - DNA, 260 bp, Unknown
  Description of Unknown: RightRegion for integrase A907 sequence
catgaagaacgtcgctgtgcgcgtccacctggacaacggactgatcgccgctgggaccggcgaggtcctgttcgagccctcggagggcgcggtctacgtcatgggcaacgacggtgctcacaccgtcttcaacttcgaccacatcacccactacgtcgtggtgccggtcgatgacgagaaggaacaggagggattccgaattggctgagacgccaacgcttctgagggttctcgatgagatcgaggacatcctcgcggag

SEQ ID NO: 38340 - DNA, 260 bp, Unknown
  Description of Unknown: RightRegion for integrase A908 sequence
ggaatccatgaagaacgtcgctgtgcgcgtccacctggacaacggactcatcgccgcaggaaccggcgaggtcatgttcgagccctcggagggcgcgatctacgtcatgggcaacgacggtgctcacaccgtcttcaacttcgcccacgtcacccactacgtcgtggttccggtcgatgaagagaaggaggggttccgaattggctgagacgccaacgcttctgagggtgctcgatgagatcgaggacatcctcgcagag

SEQ ID NO: 38341 - DNA, 260 bp, Unknown
  Description of Unknown: RightRegion for integrase A909 sequence
agaggaacacatgcagaactgcactgtccgcgtccacctggagaacggcttgatcgccatcggccagggggaggtcatcttccagcccgacgagggcgctctgtacgtgctcggtgacgacggtgcccacaccgtcttcaacttccggcacgtcagccactacgtgatcgtccccaacgacgagaaggaggggacctcaattggctgagaccccaacccttctcagggtcctcgacgagatcgaggacatcctcgcggag

SEQ ID NO: 38342 - DNA, 260 bp, Unknown
  Description of Unknown: RightRegion for integrase A910 sequence
aacacacatgcagaactccatcgtccgcgtcttcctggagagcggcctggtggccgtcggccagggcgaggtcatcctccagcccgatgagggcgctctgtacgtgatcggtgacgacggtgcccacaccgtcttcaacttccggcacgtcacccactacacgatcaccccgaacgaggagaagaacgaggagccctcaattggctgacacctcaacgcttctgaaggttctggatgagatcgagggtctcatcgaggag

SEQ ID NO: 38343 - DNA, 260 bp, Unknown
  Description of Unknown: RightRegion for integrase A911 sequence
ggaacacatcatgcagaacgcatcagtacgagtccacctggagaacggcctggtggctgttggctcgggtgaggtcatccttcagcccgacgagggcgctctgtacgtgctgggcgacgaaggcgctcacaccgtcttcaacttccggcacgtcacccactacgtcgtcgtcccgaaccaggacaaggagggcacctcaattggctgagacgccaaaccttctcagggttctggacgagatcgaggacatcctcgcggag

SEQ ID NO: 38344 - DNA, 260 bp, Unknown
  Description of Unknown: RightRegion for integrase A912 sequence
agaggaacacatgcagaactccactgtccgcgtccacctggagaacggcttgatcgccatcggccagggcgaggtcatcttccagcccgacgagggcgctctgtacgtgctcggtgacgacggtgcccacaccgtcttcaacttccggcacgtcagccactacgtgatcgtccccaacgacgagaaggagggaacctcaattggctgagacgccaacgcttctgagggttctcgatgagatcgaggacatcctcgcggag

SEQ ID NO: 38345 - DNA, 260 bp, Unknown
  Description of Unknown: RightRegion for integrase A913 sequence
tttacctttttcttcataacttccccaggtatcgttaattttgtggattgtgttatatcttgtcatttccttaacctcatactgttatttatataggaccaatagccctagtattgttgtctggatgtatactataaaagtagacaaaactttgtgtgttataatctattttaaaagacacaaaaacgaaaggacaacctatgtcaacatttaaacgctacgatgaagaatttaaacaatcccttgtcaacctttatcaa

SEQ ID NO: 38346 - DNA, 260 bp, Unknown
  Description of Unknown: RightRegion for integrase A914 sequence
aaaagacgaagaaagcagatagctctggaagcgtcatactcatatcacgggagaccttaaaaggctattgaagctcgccctatattcttgctgatactacgaggaggtgagaactatgggcgaaaattctaaacttaactggcgagtgcggtttgccaaccctacttggtgggtgttagcgggaatccctcagttgattcttattgttcagctgatcttaacttttgtaaacgattttgtttaccctacgggatatcaga

SEQ ID NO: 38347 - DNA, 260 bp, Unknown
  Description of Unknown: RightRegion for integrase A915 sequence
caggttacgttgatattgatcctattttatctactattagtgaatctatcaaaaaacaatatacaaatctccaaataccaatgaattaatttcatcaaataaaattgattttaaaatgtattagtagatctcaatatcattattaatgatactaagataattacttcatagtaaaaaatcttattagatagaaaattagtatgagatctttatattccacttgtgatgtaaaaatacctattcaaaaatggaaaaatact

SEQ ID NO: 38348 - DNA, 260 bp, Unknown
  Description of Unknown: RightRegion for integrase A916 sequence
caggttacgttgatattgatcctattttatctactattagtgaatctatcaaaaaacaatatacaaatctccaaataccaatgaattaatttcatcaaataaaattgattttaaaatgtattagtagatcttaatatcattattaatgatactaagataattacttcatagtaaaaaatcttattagatagaaaattagtatgagatctttatattccacttgtgatgtaaaaatacctattcaaaaatggaaaaatact

SEQ ID NO: 38349 - DNA, 260 bp, Unknown
  Description of Unknown: RightRegion for integrase A917 sequence
tgaagcggcacgagctgtcctgccgaacatgactaactcaccgatggtcgtcaccggcaatcaccgagcgtggcgcaacgtgatcaagcagcggtggcacacggcagcggacgccgagattcgggagctggcaggggagttgctgaagcagctacggcaggtcgctcccaacacctaccaggacatccccgaggagccgtatggctgacgtgcgggaggtagctgacctgctcaaccggctcaacgtcattgtgcgggag

SEQ ID NO: 38350 - DNA, 260 bp, Unknown
  Description of Unknown: RightRegion for integrase A918 sequence
tgaagcggcacgagccgttctcccgaacatgaccaactctccgatggtcgtcactggcaaccaccgtgcatggcgcaacgtgatcaagcagcgctggcacaaggcagcggacgccgagattcgggaactggccgggatgctcctccaggagctccggaagatcgcaccgaacacctaccaggacatccccgaggagccgtatggctgacgtgcgggaggtggcagatctgcttaataggttgaacaccattgtgcgggaa

SEQ ID NO: 38351 - DNA, 260 bp, Unknown
  Description of Unknown: RightRegion for integrase A919 sequence
tgaagcggcacgagctgtcctgccgaacatgaccaactcaccgatggtcgtcaccggcaatcaccgagcgtggcgcaacgtgatcaagcagcggtggcacacggcagcggacgccgagattcgggagctggcaggggagttgctgaagcagctacggcaggtcgctcccaacacctattccgatattccagaggagccgtatggctgacgtgcgggaggtagctgacctgctcaaccggctcaacgtcattgtgcgggag

SEQ ID NO: 38352 - DNA, 260 bp, Unknown
  Description of Unknown: RightRegion for integrase A920 sequence
tgaggctgcccgagcggtactgccgaacatgaccaactcaccgatggtcgtcaccggcaaccaccgggcgtggcgctacgtcatcaagcagcgctggcacaaggcagcggacgctgagatccgtgaactggcagggcttctgctgtcggagctgcgggagatcgctcccaacacctatcaggacatccccgaggagccgtatggctgatgtgcgggaggtagccgacctgttgaaccgtctgagcacgattgtgcgggaa

SEQ ID NO: 38353 - DNA, 260 bp, Unknown
  Description of Unknown: RightRegion for integrase A921 sequence
tgaagcggcacgagccgttctcccgaacatgaccaactctccgatggtcgtcactggcaaccaccgtgcatggcgcaacgtgatcaagcagcggtggcacacggcagcggacgccgagattcgggagctggcaggggagttgctgaagcagctacggcaggtcgctcccaacacctaccaggacatccccgaggagccgtatggctgacgtgcgggaggtagctgacctgctcaaccggctcaacggcattgtgcgggag

SEQ ID NO: 38354 - DNA, 260 bp, Unknown
  Description of Unknown: RightRegion for integrase A922 sequence
tgaagcggcacgagccgttctcccgaacatgacggactcaccgatggtcgtcactggcaaccaccgggcgtggaggaacgtcatcaagcagcgctggcacatggcagcggacgccgagatccgtgaactggcagggcttctgctgtcggagctgcgggagatcgctcccaacacctatcaggacatccccgaggagccgtatggctgatgtgcgggaggtagccgacctgttgaaccgtctgagcacgattgtgcgggaa

SEQ ID NO: 38355 - DNA, 260 bp, Unknown
  Description of Unknown: RightRegion for integrase A923 sequence
tgaggctgcccgagcggtactgccgaacatgaccaactcaccgatggtcgtcaccggcaaccatcgagcgtggcgctacgtcatcaagcagcgctggcacaaggcagcggacgccgaaatccgggaactggcagggcttctgctgtcggagctgcgggagatcgctcccaacacctatcaggacatccccgaggagccgtatggctgatgtgcgggaggtagccgacctgttgaaccgtctgagcacgattgtgcgggaa

SEQ ID NO: 38356 - DNA, 260 bp, Unknown
  Description of Unknown: RightRegion for integrase A924 sequence
tgaagcggcacgagctgtgctgccgaacatgaccaactcaccgatggtcgtcaccggcaatcaccgtgcatggcgagacgtgttgaagaagcggtggcacacggcagcggacgccgagattcgggagctggcgggagagttgctgaagcagctacggcgggtcgctcccaacacctaccaggacatccccgaggagccgtatggctgaagtgcgggaggtagctgacctgctcaaccggctcaacgtcattgtgcgggag

SEQ ID NO: 38357 - DNA, 260 bp, Unknown
  Description of Unknown: RightRegion for integrase A925 sequence
cgagttagctccaaaaaacaaagcgaacatttcgaacatcagatcgaattctgcaaataatactatccagattacacagttattacagatattttttcgggaattaattttaacagaaaaggtatacagatcgttttggaatcggcgatgcgcggagatctcgaagaacttgtggttgcctacaaagatagactgtgtagattcggttacgaacttatcgaattgatcgttggaagatacggtggacgaatcgtcgtttt

SEQ ID NO: 38358 - DNA, 260 bp, Unknown
  Description of Unknown: RightRegion for integrase A926 sequence
acgagccgttctcccgaacatgaccaactctccgatggtcgtcactggcaaccaccgtgcatggcgcaacgtgatcaagcagcgctggcacaaggcagcggacgccgagattcgggaactggccgggatgctcctccaggagctccggaagatcgcaccgaacacctaccaggacatccccgaggagccgtatggctgacgtgcgggaggtggcagatctgcttaataggttgaacaccattgtgcgggaactggtttca

SEQ ID NO: 38359 - DNA, 260 bp, Unknown
  Description of Unknown: RightRegion for integrase A927 sequence
acttttgactaaaaaaagtgagatgtgaatcacggacataaaaccataattttcgatgtcatggttccaattaaatttgattgttatcgtatggaagcttggggcggagtaggcgtcatctggtcgttctggtagaagaattgcgcgaacgcagcgttaatttccgcagcctgacagattccatcgataccagtacaccaatgggacgtttctttttccatatcatgggcgcactcgctgaaatggaacgtgaattaatt

SEQ ID NO: 38360 - DNA, 260 bp, Unknown
  Description of Unknown: RightRegion for integrase A928 sequence
ccaaacgttattcttatcgaaaatgtcggtgatgaatatttttataaattgatgaagtaggaaagaaatgaagaatattaattttagagcgtggaacaatgagctaaagcgttacttctatatgaaagacgaaaacagcttaatgatcgcagaaacaaactgcacagttgcaatgtggtgtagcgatggaatatttgatgaatgtgatgccgatgaagttgaattagcaatagggatgaaagactttgacggtaaagaca

SEQ ID NO: 38361 - DNA, 260 bp, Unknown
  Description of Unknown: RightRegion for integrase A929 sequence
gaagaggagaaccttatcttaaaaaaagcaagtgccatattcatgcaaaacttaaagtaagactcctcgctgtctatcggttacgctttgaacacgccacaacaatcttgtgtcgtgttttacgtgtcaatcgctccacttactataaatttctaaaacataagccctcaaaaagagatttggataatcaaatttatagaaaacaaatacttgagatttataccaaagcaaacaaaagacttggtgcgaagtctatcaag

SEQ ID NO: 38362 - DNA, 260 bp, Unknown
  Description of Unknown: RightRegion for integrase A930 sequence
tcgctgtctgaggagaacgaaatcctaaaaaaagccctaggctttcttgcgcagaagtaaccaatatctttgattacattcaccaagaaagccatcaccaccaggtaaccaagatgtgccgaatcctcggtgtttccagagctcagtattatcgttatcgatcccccaaaccttcaaaacgccgggccgaagatgcggacttgaaacaacggattctgcggatctttgcggaatttaagcagcgatacggtgttatgaag

SEQ ID NO: 38363 - DNA, 260 bp, Unknown
  Description of Unknown: RightRegion for integrase A931 sequence
cgaagcggcgcgagccgtcctgccgaacatgaccaactccccgatggtcgtcaccggcaaccaccgagcgtggcggtacgtcatcaagaaccgctggcacgaggccgcggatgccgaaatccgtgaactggcaggggaattgcttcggcagctccgggagatcgctcccaacacctaccaggacatccccgaggagccgtatggctgacgtgcgggaggtagccgacctgctcaaccggctcaacgtcattgtgcgggag

SEQ ID NO: 38364 - DNA, 260 bp, Unknown
  Description of Unknown: RightRegion for integrase A932 sequence
tgaggctgccaggtcagtcctgccgaacatgaccaactcaccgatggtcgtcactggcaaccaccgtgcatggcgcaacgtgatcaagcagcggtggcacacggcagcggacgccgagattcgggagctggcaggggagttgctgaagcagctacggcaggtcgctcccaacacctaccaggacatccccgaggagccgtatggctgacgtgcgggaggtagctgacctgctcaatcggctgaacacgattgtgcgggag

SEQ ID NO: 38365 - DNA, 260 bp, Unknown
  Description of Unknown: RightRegion for integrase A933 sequence
tgaagcggcacgagctgtcctgccgaacatgaccaactcaccgatggtcgtcaccgggaatcaccgggcatggcgcaacgtgatcaagcagcggtggcacacggcagcggacgctgagatccgtgaactggcagggaaattgctgcggcagctacggcaggtcgctcccaacacctaccaggacatccccgaggagccgtatggctgatgtgcgggaggtgtccgatctgctcaaccggctcaacgtcattgtgcgggag

SEQ ID NO: 38366 - DNA, 260 bp, Unknown
  Description of Unknown: RightRegion for integrase A934 sequence
tggattcccaacaagatacccttgtttaaatgttgatatatactttccgtaattatgtattgcacgaacatcagccatatccttatcttgtctacgctctgtcaaagacacttcgtggttgtggatgtatactataaaagtagacaaaactttgtgtgttataatctgttttaaaagacacaaaaacgaaaggacaacctatgtcaacatttaaacgctacgatgaagaatttaaacaatcccttgtcaacctttatcaa

SEQ ID NO: 38367 - DNA, 260 bp, Unknown
  Description of Unknown: RightRegion for integrase A935 sequence
aggttacgttgatattgatcctattttatctactattagtgaatctatcaaaaaacaatatacaaatctccaaataccaatgaattaatttcatcaaataaaattgattttaaaatgtattagtagatcttaatatcattaataatgatactaagataattacttcaaagtaaaaaatcttattagatagaaaaattagtatgagatctttatattccacttgtgatgtaaaaatacctattcaaaaatggtataatatc

SEQ ID NO: 38368 - DNA, 260 bp, Unknown
  Description of Unknown: RightRegion for integrase A936 sequence
ggaggtggattgtgagtgaattaattaaggttttggatggtggtgatttccgtgatcgttggaatgagctttgtatcaagctagaagattatgaaaacatcaattgtgataattacgaacaagagctccatgatttatttgaataccacagctttaaatttgatgaatcaaagcacgaatattgggaaatcgaataatgagtgaagttaaagcggaaagtaaggaggggtgaaatgacaaaaacatccatagatcaagaa

SEQ ID NO: 38369 - DNA, 260 bp, Unknown
  Description of Unknown: RightRegion for integrase A937 sequence
atcgctgaacagatgggcgtgagccgtgcaaccctttaccgcaatttggagaccgcataatgagcgccaagccgctaaccgccgccgaggctaaatgggtgaaggacttgcagacccttctgaacaagtgcccatccaagcgaatggtcgccttcacgattggcgatcccatggtggttatctatgactcctcattttctggcgagatagatgacatcatgaaccgctcaaacaaggatgtgtgccaagtcgtgacagcc

SEQ ID NO: 38370 - DNA, 260 bp, Unknown
  Description of Unknown: RightRegion for integrase A938 sequence
ctttttgatgttagcatttccactctttacaagaaattccctgtaaatcagtcgcgttgaaagtggcgatattgtaccagcactgacacatcgtgaaatgcgtgcgccgcacgcctggcaaccagaacataaggtatccctgtcaaccggagagactgccttatggctcaggattaccaccacggggtgcgcgttgttgaaatcaacgagggcacccgacctattaccacggtgagcactgccatcgtgggcatggtctg

SEQ ID NO: 38371 - DNA, 260 bp, Unknown
  Description of Unknown: RightRegion for integrase A939 sequence
tttcacgaaccccattcagaaacgaatgcactccgccaaagatagataaaaataaaattgttaagtcagacataaaaaccttgccaattttgagttgttcgtcattggggaacggtatgtactttgtgatttccatacatactggtttttgttaattaaaatccgcagcttgctataaataacgatagtgagcagaaaatatgctaataggctatgtacgcgtatcaacaaatgaacaaaacactgctttgcaacgaaat

SEQ ID NO: 38372 - DNA, 260 bp, Unknown
  Description of Unknown: RightRegion for integrase A940 sequence
cctctgcggcctcttgtgggatagagatttttttagtcatgggaatcagtcctgttaaggctccccaccacaatggctaaaggtacaggacagaccggggagcaagttaagtataaccacttcaaaataattaaacaaatgacttgattttacccgatctagtgactaagattaattcaacttaaacaggaaggataattatgaaattcaccgacacaccaacaaccacgcttgatgaggtacttatctcaacgcgtggc

SEQ ID NO: 38373 - DNA, 260 bp, Unknown
  Description of Unknown: RightRegion for integrase A941 sequence
cattggcgaaactgcaaattattttggcggtttgggtggaagcaatccccatcaaagctacacgctaacgttcagttttttatctttggattcacaaagtgtaacggtcgatacagccttaggttgttcaatcaagagcttagtttttactactagaagacggcaacctcttaaattcaacttaaacaggaagactaatcatgaaattcacagacacaccaaccactacgcttgatgaactgctcatctcaacgcgtggc

SEQ ID NO: 38374 - DNA, 260 bp, Unknown
  Description of Unknown: RightRegion for integrase A942 sequence
ggtgtggcacgttttgttttttacattctttattgcacataatattcagtcctgttaaggctccccaccacaatggctaaaggtacaggacagaccggggagcaagttaagtataaccacttcaaaataattaaacaaatgacttgattttacccgattcagtgactaagattaattcaacttaaacaggaaggataattatgaaattcacagacacaccaaccaccacgcttgatgagttgctaatcaaacatcgaggc

SEQ ID NO: 38375 - DNA, 260 bp, Unknown
  Description of Unknown: RightRegion for integrase A943 sequence
attaacaaaatggtttctgactcaggccaatcaagcatcggaatggccattgcgatgaattcaattccagacctaactctcgctctattcaattttcaagaagctgtaaatccagcgatggagtcacaaggtgtgaaaatcctcaccctttctgagttgttcggtcaagaaattacactgacagttaagtaaggaatattatgaaattcaccgacacaccaacaaccacgcttgatgaggtacttatctcaaagcgtggc

SEQ ID NO: 38376 - DNA, 260 bp, Unknown
  Description of Unknown: RightRegion for integrase A944 sequence
attaacaaaatggtttctgactcaggccaatcaagcatcggaatggccattgcgatgaattcaattccagacctaactctcgctctatttaattttcaagaagctgtaaatccagcgatggagtcccaaggagtgaaaatcctcaccctttctgagttgttcggtcaagaaattacactgacagttaagtaaggataattatgaaattcacagacacgccaaccacaacgcttgatgaactgcttgagtttacgcacggc

SEQ ID NO: 38377 - DNA, 260 bp, Unknown
  Description of Unknown: RightRegion for integrase A945 sequence
attaacaaaatggtttctgacgcaggtcaatcaagcataggaatggctattgcaatgaatgcaattccagacttaactcacgctctattccattttcaagaagctgtaaatccagcgatggagtcccaaggagtgaaaactctcaccctttctgagttgttcggtcaagaaatcacactgacagttaagtaaggaatattatgaaattcacagacacaccaacaaccacgcttgatgaggtacttatctcaacgcgtggc

SEQ ID NO: 38378 - DNA, 260 bp, Unknown
  Description of Unknown: RightRegion for integrase A946 sequence
tggattctgttatcggctaaccggaagggagttaaaaaacgggattaccgcgctaactagaagcatgagggaaggttgtggcatccggtgaacctgtaggaatcccataactgattaaggacggaaaccaccagatgccacgaagatgttatggcgcatgttgttgtgggaagtcaataaaggagatggttttgtttaaaaaatagtctatcatggtgagaaaatgattttgataagtaggctaactttctgaaaatact

SEQ ID NO: 38379 - DNA, 260 bp, Unknown
  Description of Unknown: RightRegion for integrase A947 sequence
gtgcgagtgcatcgcgatggctggaataatatcacgcacttggagtggttaaacaaatgagaaagaacggtaacagcaagcatgtgctgcgcgtcattaccgatcaccagccagtgactaccaagaagattgctttcttgctcgggctgacaagtaagcaggttagtgacgcaactcaatacctgcgtgataagtcattggtaaagcttgtgcgtaacggctatgtggtcataggcggcgagtttgacaatgtaccggcc

SEQ ID NO: 38380 - DNA, 260 bp, Unknown
  Description of Unknown: RightRegion for integrase A948 sequence
agcctctgcggcttctagtgggatttgcactgtcataaatatagtcctgaatttaatgctccccaccacaacggctaaaggcacaggacagagccgaggagcaagttaagtataaccacttcaaaataattaaacaaatgacttgattttgttcaatatgctgattaagattaattcaacttaacaaacaggatgattaaatgaaattcacagacacaccaaccaccaccattgatgaagtgttaattagcactcgtggc

SEQ ID NO: 38381 - DNA, 260 bp, Unknown
  Description of Unknown: RightRegion for integrase A949 sequence
gggaagctagtggttttcgttgctgaccgtagacaggggcatcataagaaggctaactaacaatgcaaacaccaaactacgcacgtaacgcacacaaggctgcacaagccgaaagagacaaagactatccaatggcagcggtgtattggaataaagccgctaaaagcgagtgtagcgacaaacagcgccattgggctgagtgtcgctgtcataactgcaaaagatttgtggaggaatgggatgtttagattaatatgcgc

SEQ ID NO: 38382 - DNA, 260 bp, Unknown
  Description of Unknown: RightRegion for integrase A950 sequence
cctctgcggcctcttgtgggatagagatttttttagtcatgggaatcagtcctgttaaggctccccaccacaatggctaaaggtacaggacagaccggggagcacgttaagtataaccacttcaaaataattaaacaaatgacttgattttacccgactcagtgactaagattaattcaacttaaacaggaaggaatattatgaaattcacagacacacccaccaccacgcttgatgagttgctaatcaaacatcgtggc

SEQ ID NO: 38383 - DNA, 260 bp, Unknown
  Description of Unknown: RightRegion for integrase A951 sequence
cctctgcggcatcttgcgggatagagatttttttagtcatgggagttagtcctgttaaggctccccaccacaatggctaaaggtacaggacagaccggggagcaagttaagtataaccacttcaaaataattaaacaaatgacttgattttacccgatccagtgactaagattaattcaacttaaacaggaaggataattatgaaattcacagatacaccaaccacgacacttgacgaagtacttatctcgactcgtggc

SEQ ID NO: 38384 - DNA, 260 bp, Unknown
  Description of Unknown: RightRegion for integrase A952 sequence
tctcttggtgcgtcatggcgtcgcattttttattacacataataatcagtcctgttaaggctccccaccacaatggctaaaggtacaggacagaccggggagcacgttaagtataaccacttcaaaataattaaacaaatgacttgattttatccgattcggtgactaagattaacttaacttaaacaggaaggaatattatgaaattcaccgacacaccaaccacgaccattgaagaattgctaatcaaacatcgtggc

SEQ ID NO: 38385 - DNA, 260 bp, Unknown
  Description of Unknown: RightRegion for integrase A953 sequence
gagcgtcagacgctgtttttccacattctttattacacataataatcagtcctgttaaggctccccaccacaatggctaaaggtacaggacagaccggggagcacgttaagtataaccacttcaaaaaaattaaacaaatgacttgattttacccgattcagtggctaagattaattcaacttaaacaggaaggaatattatgaaattcaccgacacgccaacaacgactattgatgaggtgcttatctcgactcgtggc

SEQ ID NO: 38386 - DNA, 260 bp, Unknown
  Description of Unknown: RightRegion for integrase A954 sequence
ctctgcggcctcttgtgggatagagatttttttagtcatgggagttagtcctgttaaggctccccaccacaatggctaaaaggtacaggacagaccggggagcacgttaagtataaccacttcaaaataattaaacaaatgacttgattttacccgattgagtggctaagattaattcaacttaaacaggaaggaatattatgaaattcaccgacacaccaaccacgaccattgatgaggtacttatctcgactcgtggc

SEQ ID NO: 38387 - DNA, 260 bp, Unknown
  Description of Unknown: RightRegion for integrase A955 sequence
tttcttggtgcgtcatggcaccgcattctttattacacataataatcagtcctgttaaggctccccaccacaatggctaaaggtacaggacagaccggggagcacgttaagtataaccacttcaaaataattaaacaaatgacttgattttacccgattcagtggctaagattaactcaacttaaacaggaaggaatattatgaaattcaccgacacacccaccactacgcttgatgagttgcttgagtttacgcgtggc

SEQ ID NO: 38388 - DNA, 260 bp, Unknown
  Description of Unknown: RightRegion for integrase A956 sequence
cactggcaaccaccgtgcatggcgcaacgtgatcaagcagcgctggcacaaggcagcggacgccgagattcgggaactggccgggatgctcctccaggagctccggaagatcgcaccgaacacctaccaggacatccccgaggagccgtatggctgacgtgcgggaggtggcagatctgcttaataggttgaacaccattgtgcgggaactggtttcagagaactctcagctgaaagcggaggctgagggcaaggctagt

SEQ ID NO: 38389 - DNA, 260 bp, Unknown
  Description of Unknown: RightRegion for integrase A957 sequence
ctgccatttctttggagatttttacttgtgatttagtcatgggaattagtcctgttaaggctccccaccacaatggttaaaggtacaggacagaccggggagcacgttaagtataaccacttcaaaataattaaacaaatggcttgattttaatcattactgtgattaagattaattcaacttaaacaggaaggaatattatgaaattcaccgacacaccaacaaccacgcttgatgagttacttaactcaacgcgtggc

SEQ ID NO: 38390 - DNA, 260 bp, Unknown
  Description of Unknown: RightRegion for integrase A958 sequence
ctgccatttttttggagatttttacttttgatttagtcatgggatttagtcctgttaaggctccccaccacaatggctaaaggtacaggacagaccggggagcacgttaagtataaccacttcaaaaaaattaaacaaatggcttgattttacccgatttggtggctaagattaattcaacttaaacatggaggataattatgaaattcaccgacacaccaaccacaacgcttgatgaggtacttatctcaacgcgtggc

SEQ ID NO: 38391 - DNA, 260 bp, Unknown
  Description of Unknown: RightRegion for integrase A959 sequence
ctagtgcgcgtcgagattcatggcgactttgaagaaaagttaactgtgattaatcattagtgtgaagttggtcacagcattaggcttgttttgtggttattatctaaacatcaaattaagagggcgtaacaatgggtttagtattaacaacgctaaccgaagcaaaagcgaacgggaatcttagagaagaatcattgcgcatggctggattgcttgggatggaattcaatcagtttattgaagaattagatatcggctgg

SEQ ID NO: 38392 - DNA, 260 bp, Unknown
  Description of Unknown: RightRegion for integrase A960 sequence
aaattttgcgttgataagtctctaacaattggcaaaacaaccattcaagtaaagagtactaagaagcttgataagggcgaaatgaccttttacatgaatcaaattcaccagtgggcggttaatgcaggatttaggctatcaatgccagaagattccgaatactaccaggcaatgcaacaacaaaaccaataggaaaaaccatgctaaaaacaaaaccaacccaagtgtgcactgtggccgatgttttagtgaagactcgc

SEQ ID NO: 38393 - DNA, 260 bp, Unknown
  Description of Unknown: RightRegion for integrase A961 sequence
tacgggtggacataccgagacgccggcacattcacggcgtcgatgcggtgggcccgatgaccaaccccgacaccaccaccaccgacccctacgacggcctcggatacgccgacgtcgccgacatctactacaccgccggctggcacggcgtcctcccactccgacccggcgtcaaagggccaccaccccaagggttcaccggcatcgacgcccccatgccctcataccccgacgtactcgaatggatcgaccgccacccc

SEQ ID NO: 38394 - DNA, 260 bp, Unknown
  Description of Unknown: RightRegion for integrase A962 sequence
aacggcgttttaatgattcatcagggcgggagaggtatctatgaccgtaaccagcattaaccaggcgaaacagcagtgtgaacgtgacgaagctgaattgcgcagcgtcagagagatgacggagcaacaccagaaggcgatggattatctgcatgagcgagagcgtgaactggtgaaccggcttggattgaacaagacatcgggaggcgatgctgcatgaatttggaaaacactgtgaaattccactctccgaagtctcc

SEQ ID NO: 38395 - DNA, 260 bp, Unknown
  Description of Unknown: RightRegion for integrase A963 sequence
aacggcgttttaatgattcatcagggcgggagaggtgtctatgaccgtaaccagcattaaccaggcgaaacagcagcgtgaacgtgacgaagctgaattgcgcagcgtcagagagatgacggagcaacaccagaaggcaatgaattatctgcatgatcgagagcgcgaactggtgaaccggcttggattgaacaagccagcgggaggcgatgctgcatgagtatacgagaattgaacctcactaaagagcagcatgactg

SEQ ID NO: 38396 - DNA, 260 bp, Unknown
  Description of Unknown: RightRegion for integrase A964 sequence
aacggcgttttaatgattcatcagggcgggagaggtatttatgaccgtaaccagcattaaccaggcaaaacatcagcgtgaacgtgacgaggctgaattacgcagcgtcagagagatgacggagcaacaccagaaggcgatggattatctgcatgagcgagagcgtgaactggtgaaccggattggattgaacaagccagcgggagacgatgctgcatgagactcgaaagcgtagctaaattccattcgccaaaaagccc

SEQ ID NO: 38397 - DNA, 260 bp, Unknown
  Description of Unknown: RightRegion for integrase A965 sequence
aacggcgttttaatgattcatcagggcgggagaggtatttatgaccgtaaccagcattaaccaggcgaaacagcagagtgaacgtgacgaggctgaattgcgcagcgtcagagagatgacggagcaacaccagaaggcgatggattatctgcatgagcgagagcgagaactggtgaaccggcttggattgaacaagccagcgggaggcgatgctgcatgagtatacgagaattgaacctcactaaagagcagcatgactg

SEQ ID NO: 38398 - DNA, 260 bp, Unknown
  Description of Unknown: RightRegion for integrase A966 sequence
aatggtaaattattcgttaaaccaggattaaaaggacgacatacccgtgacaaaagataaacagttattacgcgacctggaagaaaattatgaacgtgcgctggctgctgtagcatatctggaagaacagatccgcgaagttaaaaaccgtttacagggtaacgagaaacgtaatctaccccattgttaaacctgtgatataatcagccttagtaactctactgaggcttttttatggctgttaaagacccatatccgga

SEQ ID NO: 38399 - DNA, 260 bp, Unknown
  Description of Unknown: RightRegion for integrase A967 sequence
gaggggattgcgttggcgaaggcgcgtggtgtgtgtactgacctgatctgtcccgtttgacccacgaacatcgtgaacgcgggcagaattgcactctgtgacagagccgaaaacgattcgtcggtatacgactcgtgcattgcttgacgtcggacctcaaccaggaatggtcatccgcgcctccgacgacgatgctgctccgtggaagctagtcgacactctccacgacgaatggttttgggacacaactcccggccagg

SEQ ID NO: 38400 - DNA, 260 bp, Unknown
  Description of Unknown: RightRegion for integrase A968 sequence
aacggcgttttaatgattcatcagggcgggagaggtgtctatgaccgtaaccagcattaaccaggcgaaacagcagcgtgaacgtgacgaggctgaattacgcagcgtcagagagatgacggagaaacaccagaaggcgatggattatctgcatgagcgagagcgtgaactggtgaaccggcttggattgaacaagacatcgggaggcgatgctgcatgaatctggaaaatgtagtgaagtttcacttcgcaaaatctac

SEQ ID NO: 38401 - DNA, 260 bp, Unknown
  Description of Unknown: RightRegion for integrase A969 sequence
aacggcgttttaatgattcatcagggcgggagaggtatctatgaccgtaaccagcattaaccaggcgaaacagcagcgtgaacgtgacgaagctgaattgcgcagcgtcagagagatgacggagcaacaccagaaggcgatggattatctgcatgagcgagagcgtgaactggtgaaccggcttggattgaacaagccgtcgggaggcaatgctgcatgagtatacgagaattgaacctcactaaagagcagcatgactg

SEQ ID NO: 38402 - DNA, 260 bp, Unknown
  Description of Unknown: RightRegion for integrase A970 sequence
aagatgcttgggattagtcgctcggggttgggtggtatcttgaagagggtgagtagatgattgtctttttatgcgtcttgctatttgctgttatagcagggtggaagtcggatagttggcatggctcactattgatggggtttataattttagctttgttgttgtcgatattaagagttggaggttgggtgtgaaaattgatggtaaatacgattcttatattgtttatagtgagaaggggtataaaaatagaatccgat

SEQ ID NO: 38403 - DNA, 260 bp, Unknown
  Description of Unknown: RightRegion for integrase A971 sequence
caatattgtgaccactagactttatttagaaggaagtgtttcagaagatctatttgaagaaattatggattctgccgatttgtctaagtgggatccgattgcaccacatggttttttcttaatagatattggctttactgaagatggtgctgaagctttgtttgcaaaagaagttaaagcggaaagtaaggaggggtgaaatgacaaaaacaccaatagatcaagaaattgacgaggccatagctaatggtgaaagcttt

SEQ ID NO: 38404 - DNA, 260 bp, Unknown
  Description of Unknown: RightRegion for integrase A972 sequence
gggtggcaagaaaaagccaaagctcaggcggtgccagagggttatgttgtagtgccgaaagatgttgcagaacgaacaattggtcatattggcatagcaatctatcatccaaacaatactcgtgatgaagaaaatattatgagtgaagaccaagtggttattgagcgcgctattgaagcaagcgaatcgggagctgagggatgaatagatcaatagagcaagaaattgacgaagctatagctaacggtgaaagcttttat

SEQ ID NO: 38405 - DNA, 260 bp, Unknown
  Description of Unknown: RightRegion for integrase A973 sequence
aaagaagtggttgaggagatgcggggtgtagacaatatgctggctagtttaatggatgccaatgttgattgggcttactcattccctgtttacaaaggtgaggataaagcggttattgcatcaaactttgctaatgagtcataccagatttgtaaggatgaagaaaatcgtgcggctaatgttaaggagttttactagcaatgaaaacaaccgtagatcaagaaattgacgaagccatagctaatggtgaaagcttttat

SEQ ID NO: 38406 - DNA, 260 bp, Unknown
  Description of Unknown: RightRegion for integrase A974 sequence
attgtaaatggtaagttatttgttaaacctggctttaaaggacgcattaagcatgactaaagacgaacagttattacgtgatttagaacaggattatgaacgtgcacagactgctatagcttatctggaagaacagatccgtgaagttaaaaaccgtttacagggtactgaaaaacgtgtcgtacagcgataacttaaacctgtgatataatctgcctcagttaccacgactgaggcttttctatggcagttcgcgaccc

SEQ ID NO: 38407 - DNA, 260 bp, Unknown
  Description of Unknown: RightRegion for integrase A975 sequence
aataacccaagcgatgcatggccgattattgttgagagcaagatttcattaattgaagagggtgacgagtgggcggcttactttgtttttgagttacctgaaaacatggagggcggtgggtgtgattttattcatggatggactgataaaaacccactacgcgccgcaatgattgtttatcttatgatgcaggaggcgaaatgctaacaatctcagaccttttagtcatgacgcgcggcaaccaatcagaagtcgcacgt

SEQ ID NO: 38408 - DNA, 260 bp, Unknown
  Description of Unknown: RightRegion for integrase A976 sequence
agcctttaccgcaaaatgaaagaattgaaagtttttactgaagagaaggaaaacaactaatgcgcgatttccgtaaagctttaaacaacaatgttatgatgaagtatgaatctttctttggtcatggagatatcaaaacgttttggattgaacttaaatcgggtttgacactttcaattcaagctggggaaggtaattatagttctccacgcacaaactttaaacatcctcagtttcagcgttataaagaatttgagatt

SEQ ID NO: 38409 - DNA, 260 bp, Unknown
  Description of Unknown: RightRegion for integrase A977 sequence
accaaaactttataaaaatgaaggaaaaaataatacgaattttagaaaatagagcaacaaagtttgaatctataaaccactcttatgaagcacgggaagtaaaaagcgcaatagacacaattaaaaggctcgtacctcctgaattatttgatatacacattgttacctgacgaagtgaacagtttaaaatactatttattatgaaaaaatggactaaagaagaagaacaagaattagtgaggcttactgaaaatgcgtgg

SEQ ID NO: 38410 - DNA, 260 bp, Unknown
  Description of Unknown: RightRegion for integrase A978 sequence
acgacggtgctcacaccgtcttcaacttcgaccacatcacccactacgtcgtggttccgatcgatgacgagaaggaagaggagggattccgaattggctgagactcgccaacgcttctgagggttctcgatgagatcgaggacatcctcgcggagaacgaagacctgcggcatgaggtcgagaagctgagggcagagtcgttgcacgccaagggcgctggccgaccgaaccgcaagaagctctctgccgaagaggccaag

SEQ ID NO: 38411 - DNA, 260 bp, Unknown
  Description of Unknown: RightRegion for integrase A979 sequence
atagatcgcgatacggtcaagcgatgggtggcagagcataaaaactcaaaaggttcgtagcgttacaaacagcaataaggcttcgaagccagggagcaaaacacagccaccctatatttgaggtgtcaacctgtaagacatcccatggcaatcacccgcgtaactcgcgacgtcacgatctcgtttcgagtcagtgagaaggaagccgagctcctgaacagagccgctgacagtcgctctctgaataccagcgcctggat

SEQ ID NO: 38412 - DNA, 260 bp, Unknown
  Description of Unknown: RightRegion for integrase A980 sequence
gtagccgatgtgacaggcgtggacgtgaaaacaatctacaagtacctcccggcgacttgaagacaaagatttcactacttttcctgatatgttacgtttggcttaatcaattcattcagctttgaaaacagtttgggttgttcgtgaacggtaagaaaacaataagttttgagcaatttttaactattaacagcaatcttgtttccatctcagatacatgggctgacttgtgggcgttaatttttcacacgggtttaagc

SEQ ID NO: 38413 - DNA, 260 bp, Unknown
  Description of Unknown: RightRegion for integrase A981 sequence
gcacagagcttaaatgtaagtgtggctaccgtgtttaaacattgtaaggcaggtgattgatggctaaggcaagagaatcacaagcagaggctcttgccagatgggagatgctacaggaattacagcagacctttccttacacagcggaaggtttgcttctctttgcagatacagttattcataacttgattgcaggcaaacctcatctgattcgtatgcaggccgatattttaaagtttctattctatggacataaatat

SEQ ID NO: 38414 - DNA, 260 bp, Unknown
  Description of Unknown: RightRegion for integrase A982 sequence
ttgaactgcaggaagttcacaccccaatcccaaatgagtacagcaggaggagcagtatgaagccaccacgccggcgatcagggaccgtgtccaccaggcgcgggtgaagaacgcgttggagcccgagtgggaagccaggttcgacggcaggagctacggcttccgccccggacgtggatgtcaggacgcaatggagacgatccacaatgtcaccgctaagcgcaacgcgcgacggctgtgggttctcgacgcggatctgg

SEQ ID NO: 38415 - DNA, 260 bp, Unknown
  Description of Unknown: RightRegion for integrase A983 sequence
accctggatcgataccggcggggccgcgacgccgacgcggccccgcccgggacggcctgatcccgcctcgggggcctctccagctcgagcggccgcacggcgtcggggttccgcaaccctcgacgccgtgcggttttctttttagccgtcgtccagttcgaggatcgttcgttctcggagtagtcgtggacgcgaccacggcggatacgaacgatcgaatcgcgaaccgagccgcgtagttcgaattcgaagcggctccc

SEQ ID NO: 38416 - DNA, 260 bp, Unknown
  Description of Unknown: RightRegion for integrase A984 sequence
cccgcctcagacccttatcggacgggctctcagtcgcaccatacaatctatggaaagtagcaaatctcaattatatttcgaccaagtctcaatgatttttctttcttctttagtcattccggtaagattattgagtggcatgaagtgtgtcagtactgcagctgtttttatggcctgacggttgcttacgatctcatccggcgtatccagcaaaacaccgttcggcggcgcatgtacgtccttgtaagagggattttgcg

SEQ ID NO: 38417 - DNA, 260 bp, Unknown
  Description of Unknown: RightRegion for integrase A985 sequence
gctctgggcgccacgcccggttcccaatcatcctcagcagcaaggaccacagcacaatgaagacggctcggacggcggggccacgcactgggcggtcgtcgcctcgctggtcgagacgtgcaagctgaacggggtcgagcctcaggcctatctgaccgacgtgatcgcccgcatcgtcgccggccatccgcagagtggcctcgacgatctgttgccctgggcctacgccccgcaacccctcaaggctgtggcttgaggac

SEQ ID NO: 38418 - DNA, 260 bp, Unknown
  Description of Unknown: RightRegion for integrase A986 sequence
aaaggtctatggatcaagaccatagatcaaaacccaaccctcttcgaacacatgctatgagccagggggcattatgaaagtcgatccaacagccctttgatgtcgaattcgagaacccgatcatacttccagcaccgctggcgcgtcacgcccacggcatccagggccgattttcccggcctgtaaccgtaggagtcgggaagaaagagggagtccaaatccggctcgatcatctgcttgaccaccatctgcgcgatccg

SEQ ID NO: 38419 - DNA, 260 bp, Unknown
  Description of Unknown: RightRegion for integrase A987 sequence
gtcgccgtgctcggcctgctcacgaggcgatctctcgaagctcgccggtcgcccatttgaggggcaggcggccgaggctccgatcaatccgtcttcgaccttggcgcgaggcgagcgaccatcggcgcggcaagcgcgtggtagagcccttcgcggcacacgagcttcgaggtcgcgtcggcgatcacggccgagaccatcagcggaatgatcatggcatggttctccgtcatctccgacacgatgacgaaggaggtgat

SEQ ID NO: 38420 - DNA, 260 bp, Unknown
  Description of Unknown: RightRegion for integrase A988 sequence
aaaggcttgcgtatcaaggctgtcaacgatcaacctgacctcttcgaacactcctcatgaaccaaagggtattgcgatgcacgatccaagaacttctccagatcaacatccaccaccactttgcgccccgaggacacataccgctgagccgccaaaacggcgtcctgcgcgcaacgtcccgggcgaaagccgtagctgtgttcactgaaagttggatcgaggagtggctgcaagacttgcagcagcgcttgttggatcaa

SEQ ID NO: 38421 - DNA, 260 bp, Unknown
  Description of Unknown: RightRegion for integrase A989 sequence
ataaacgaagccgtcattgttcaactcgaaaacttcaacttcaacgtgtgcttaaactagcgcttactagctgtgcgccgaactgcgaagcggaacaggacggagaaaggatttacatccgcaccatcgcgaagatcaaaccaggcgacgaaatcctgatcgattaccggcttgacgtggggacccggccaatcaaagcactgaaggcgacatatggatgccggtgtggcgccaagcgatgtcgactaacgatgttgcat

SEQ ID NO: 38422 - DNA, 260 bp, Unknown
  Description of Unknown: RightRegion for integrase A990 sequence
tggcaaggagaaacatcagtgcttgcccaatccaacgagagtgacgatgaacgaacttagcaacaaaagttgcaatgcgataggtttagcttggagaagcaaataatgaaacaacaatctaaatcaacagactcgaaacattcggctgaaaaagttgaggtttacagcggcagtctggctgggtcatctccaccacccaccgctttttgagtagaacaaagcccttggtttgttccgggcgtaatacgacctggacaatc

SEQ ID NO: 38423 - DNA, 260 bp, Unknown
  Description of Unknown: RightRegion for integrase A991 sequence
tggtacagccgccgactctgggcagatagcaccgacgaactgacgcatccacattcataggtgcagtgtgcttgacccatctcgaccacccagcgccgcggggtcaccgagaagcctttgacctgggtgttcctggggacgacgtccacgtcgatgccgagggcggcgccgtattcggtggcctggttcttgtagccggtgtcgacccaggccttggtgacggtgggggtggtcgaccgcgaggtgggtcaggagctgct

SEQ ID NO: 38424 - DNA, 260 bp, Unknown
  Description of Unknown: RightRegion for integrase A992 sequence
tatcgacaaatgcaaaccgagccaagaacatcaactggcgaggaaagaggtgtagtatgaacgccgatcgttggcgaccaagcatacgccactgccatcccagaagatcagtttgatgcggtcggtgcgcttggccctgaacacgtagatcgtgccggagaatggatcagttcccatctcagccttcaccagcgcagccaatccctctgcacccttgcggaagtcgaccggcttggtggcgatcatgactttaaccgcgc

SEQ ID NO: 38425 - DNA, 260 bp, Unknown
  Description of Unknown: RightRegion for integrase A993 sequence
tgggcgaacaaggggcggcttgccgaactgaccagaccgaggccgcgcccgggacggtagagtgagggcggcccggctcagggcgagccgggccgccccatcgcgctcttggagggcattatggctggaacatcgagctcgggtaccagcagatgaaggaggaactggggctggaccaccacgagggccgctcgtggcggggcttccaccatcacgcctgcctggtgatgttggccttcgggttcctcaccctggagcga

SEQ ID NO: 38426 - DNA, 260 bp, Unknown
  Description of Unknown: RightRegion for integrase A994 sequence
cgccaacaaacgcaaactgagccaagaacatcaactggcgaggaaagaggtgtagtatgaacgctgatcgttgtagaacaggcagaacccttgaccgtcccaccaaagaagcttgatccgatcaggccaatgaccgacattcagcgttggtgcatggatcctttgtcaacggtttggcgataggcaggcaggatcgaaatcagtttgatccgagtgccatgccgtacaaacacaacgccgatcgtcgtcatcacgtcgga

SEQ ID NO: 38427 - DNA, 260 bp, Unknown
  Description of Unknown: RightRegion for integrase A995 sequence
tatcgacaaatgcaaaccgagccaagaacatcaactggcgaggaaagaggtgtagtataaacgccgatcgttcgtgaacaggcaggcgccttggccgtcatgccaaattagttttaccagatcacctcgtcgacccctgaagcagaacagatgaccgcccagagggtcatgcttcaacacctcctgcacccgaagggccagcgaaggaaagccgcaccgcatgtctgtatgtcccgtcgccagccacaccttgacccccg

SEQ ID NO: 38428 - DNA, 260 bp, Unknown
  Description of Unknown: RightRegion for integrase A996 sequence
tatcgacaaatgcaaaccgagccaagaacatcaactggcgaggaaagaggtgtagtatgaacgccgatcgttggcgactaggcagacgccgctgccgtcccagaagatcagcttgatccggtcggttcgtttggcccggaatacgtagatcgtgcccgagaacgggtctgcacccatctccgccttcaccagtgccgccaatccttcagcacctttgcggaagtcgacaggcctggtggcgatcatcacctttaccacac

SEQ ID NO: 38429 - DNA, 260 bp, Unknown
  Description of Unknown: RightRegion for integrase A997 sequence
cgccaacaaacgcaaactgagccaagaacatcaactggcgaggaaagaggtgtagtatgaacgctgatcgttgtaggccatcaccagaccgctgccatcccagtagatcagcttcaaccggtcggccttgcgtgactggaatacgaagaccgtcccggtaaacgggtccttgtgcagctcgttcttgaccaatgccgccaacccatcatggcctttgcggaagtcgaccagcttggtcgccaccatgatccggacgcggt

SEQ ID NO: 38430 - DNA, 260 bp, Unknown
  Description of Unknown: RightRegion for integrase A998 sequence
atcgacattctgcgcgctcgcgctcaacgcaatagacgatcgaggaaacaggcatcatgaaatcattggtgaccctgtcgtcgccaccgcgatattggaccgcctgctgcaccattcgacagtgatcacaggcttcgcgaaaagcgccgttccggccttctgcagaaggccggaacggcgctcgagacaaacgaaacagcaagtcaatgaagggggtcagttcatcgtttcgcctacggggtcaaatcttcacttcgctt

SEQ ID NO: 38431 - DNA, 260 bp, Unknown
  Description of Unknown: RightRegion for integrase A999 sequence
atccggtatctgcagaatcgtttacaacgcatcagacgatcaaaaaaggtggcatcatgagatcttcgcgtccccaatcaggtcatgccatgcgtccacgggaacctggctcgtgacgatggtcgatgagcggccgtgacgatcgtcgaggatttccaggagatcgcgccgctcggacccggtgagcactgacaagccccaatcatcgaggatcagcacctgtacgcgaccgagggccttgagcaggcggccatagcgcc

SEQ ID NO: 38432 - DNA, 260 bp, Unknown
  Description of Unknown: RightRegion for integrase A1000 sequence
atgagtcagcttcgcaaccgggtacgacgcaccaagcgttcgaagaaggaggcatcatgaagtcatcggctccccaatggctccatgccaggtgtccacggggagctgacttgtgacgatggtggatgcgcggccatggcggtcctcgaggatttcgagcagatcgcggcgttccgcggcggtgagcaccgatagtccccaatcatccaaaatcagaagctgagcgcggccgaggcttttgaggagccgggcgtaacgtc

SEQ ID NO: 38433 - DNA, 260 bp, Unknown
  Description of Unknown: RightRegion for integrase A1001 sequence
ctcgtcgatcgcctcgccgcccataaggaaaatgccagacacgccaaaaccttcaactgaatccgaaagagagatgcagtatgaatgcagatcgttgtaggttagcaccattccggtgccatcccacaccaggatcttcaggcgatcgccgcgcttcgaccggaagatcaccgtcaccccggaatgcggatcgagcttcaattcggtctgcaccatcagagccagcgcctgatgcccacagcggaagtcaaccggccgcg

SEQ ID NO: 38434 - DNA, 260 bp, Unknown
  Description of Unknown: RightRegion for integrase A1002 sequence
ctcgtcgatcgcctcgccgcccataaggaaaatgccagacacgccaaaaccttcaactgaatccgaaagagagatgcagtatgaatgcagatcgttgtaggttagcaccattccggtgccatcccacaccaggatcttcaggcgatcgccgcgcttcgaccggaagatcaccgtcaccccggaatgcggatcgagcttcaactcggtctgcaccatcagagccagcgcctgatgcccacagcggaagtcaaccggccgcg

SEQ ID NO: 38435 - DNA, 260 bp, Unknown
  Description of Unknown: RightRegion for integrase A1003 sequence
ataaaggcgctcacagcgccaaattacagtatgaccccttccaggaaagcagcatcatgaaacgttcggcgagccgaccatcgccgacgccatcctcgatcgcatcatccataacgctcatcgcatcgccctcgaaggcgacagcatgcgacgacaaaaagcgccttcaggcttgacccaggatccaaatccggaaatcactcaaccctaacagcaaccaggcatccaatgcctaaaccagctgtcccggatttactgaa

SEQ ID NO: 38436 - DNA, 260 bp, Unknown
  Description of Unknown: RightRegion for integrase A1004 sequence
ctcgatcagctcgatctcagaatcactgagcctcacgaggaggggcatcaacatgcgtaatcgagcagcaccgagagttgagcatgagatagcggcatgacgccttccttgatcggcggccaggtgaactgcccctcgattcttttgtagtaaaggacaaggccgcttccgtcccaggtcaggatcttcacgcgatctcggcgcttggaccggaagacataaagtccgccgtcgtacggattggccccaaacccctcgct

SEQ ID NO: 38437 - DNA, 260 bp, Unknown
  Description of Unknown: RightRegion for integrase A1005 sequence
cgccccaagaacctcattgattatcaaagagatgagacgatgccgctgccaggattgtgaaaggagggatgcactatgtcacgcgatttggtgacatggtgaagtgcctgtggcatgacgggctcggcatgtcgctttacgccaagaggcttgaacggggccgtttcatctggcccagcccggccagcggagccgtggccatttccgcgtcccagttcgcgtatctgctcgacgccatcgactggcgcaatccgcagcag

SEQ ID NO: 38438 - DNA, 260 bp, Unknown
  Description of Unknown: RightRegion for integrase A1006 sequence
cgccccaagaacctcattgattatcaaagagatgagacgatgctgttgccaggattgtgaaaggagagatgcactatgtcacgcgatttgcgcgccgcccccggaacagaaagcgcccagtcatccacgccgatgacgcgcggcggtttaacggtcggcaagggcaatgcccggatgacacgtagcagggtgtccctgctgactggcatcccaagcccgcgggcgagccgcgcccccgcagcgcccccgagagcaatccc

SEQ ID NO: 38439 - DNA, 260 bp, Unknown
  Description of Unknown: RightRegion for integrase A1007 sequence
cgccccaagaacctcattgattatcaaagagatgagacgatgccgctgccaggattgtgaaaggagggatgcactatgtcacgcgatttggtcggcggccccggaacaggaagagatggccggagtagggatccttcttgagaacctcctggaccaacagggcgaggccgtcgaagcccttgcgcatgtcggtggcgcccatcgccagatagacccgcaccccggcggggaccgggatcatcggcgctccagaacggcga

SEQ ID NO: 38440 - DNA, 260 bp, Unknown
  Description of Unknown: RightRegion for integrase A1008 sequence
cgccccaagaacctcattgattatcaaagagatgagacgatgccgctgccaggattgtgaaaggagggatgcactatgtcacgcgatttggtgacatggtgaagtgcctgtggcatgacgggctcggcatgtcgctgtacgccaagaggcttgaacggggccgtttcatctggcccagcccggccagcggagccgtggccatttccgcgtcccagttcgcgtatctgctcgacgccatcgactggcgcaatccgcagcag

SEQ ID NO: 38441 - DNA, 260 bp, Unknown
  Description of Unknown: RightRegion for integrase A1009 sequence
cgccccaagttttatgaagattatcaatacgataaagtcgtccggttgcccggaatttgatggagggatgcattatgaagcgcactgtgacggtctgatcaaggtgatctggcatgacggccagggcgcttgcctgttcacgaagaagctggagcgcggccgcttcatctggccatcagcggccgatggcacggtggtgatcacgcctgcgcagctcggttatctgctggaaggtatcgactggcggatgccgcaaaaga

SEQ ID NO: 38442 - DNA, 260 bp, Unknown
  Description of Unknown: RightRegion for integrase A1010 sequence
cgcccgaagttttatgaagattatcaatacgataaagtcgtccggttgcccggaatctgatggagggatgcattatgaagcgcactgtgcccgttttccgcggaagccgaagatcgcgccggagcccggtgcctccttgatcgccgtctcgaccagcgccgatagaccatcaatgccacgccgcatatccgtcaccccgcaggccagatagacacgcacattccccgaaggcccgatcatgccgcctccagacaggccgc

SEQ ID NO: 38443 - DNA, 260 bp, Unknown
  Description of Unknown: RightRegion for integrase A1011 sequence
gtcaatgaactggatttgagaatctgtcagcatgacgacagggggtatcaacatggatgatcgctggagggcattgactggcgcaatccgcgctggacacaacgccctgcaaaggctggataaatcgcgctggtcggcctgtttttattggtgtcttacgtgcctgagtggtagacatccgccatgtcgaacgccgcttctgaactggttagattacgcgctgccctggctgccgccgaggcccgtgcggaggttgcaga

SEQ ID NO: 38444 - DNA, 260 bp, Unknown
  Description of Unknown: RightRegion for integrase A1012 sequence
cggcccaagatttatgaagattatcaatatgataaggttgtccgattgcccggactttaacagagggatgcattatgaaacgcgttggcgtgaccggatgaagctcctgttcttcgatcggtccggttttgtgatggtgctgaagcgattgtcggaagaccggttccggtggccacgtcgggagatgatggtggtaacgctgacgaccgagcaattacactggattctcgacggcattgatatcgacgcgatggtccgcc

SEQ ID NO: 38445 - DNA, 260 bp, Unknown
  Description of Unknown: RightRegion for integrase A1013 sequence
cgtccacggcaagcccttgagaaggtggcagacaggtccatgcctctgcccggattttgacacaagaggtgcattatgaaacgtgatcggccttcctcgcccggaagacaaaaatcgtcccggtgaacggatccttgcgcagttcgttcttcaccatcgcggccaggctgtcgtggcccttcctgaagtcgataggcttcgtggccaccatgacccgcacccggttcgatgggaagatcatgagccagcacgcagcgcca

SEQ ID NO: 38446 - DNA, 260 bp, Unknown
  Description of Unknown: RightRegion for integrase A1014 sequence
cggcccaagttttacgaggattatcaatacgataaggtcgttcgactgcccggactctaacagagggatgcattatgaaacgcactgtggcggcttgatcaaggtgatctggcacgacggccagagtgcctgcctgttaacaaacgatcggcattcatactacacctctttcctcgccagttgatgttcttggctcggtttgcatttgccggtgcgcggcagcgcgatctttgaattggttccatcggctgcattgcttt

SEQ ID NO: 38447 - DNA, 260 bp, Unknown
  Description of Unknown: RightRegion for integrase A1015 sequence
atcgcgcaacttgatctaagaatctgtcagcctaacaaggaggggcatcaacatgggtgatcgaacagcgcttcgaactgcacgcgcgtcagatgcatgacgccgtcgctgatctgcggccactcgaaacgaccatcgcggccaaggcgcttgtagaccaaaacgaggcccgtgccgtcccatagcaaaatcttcagccggtcggcgcgcttcgaacgaaaaaccacgatcaggcccgaatgcggatcgagcccaagcgt

SEQ ID NO: 38448 - DNA, 260 bp, Unknown
  Description of Unknown: RightRegion for integrase A1016 sequence
cgcgaatatcgcgtcgagccgtcaacaacgcattcacgtaacgcaggaggtgcagtatgagttcaagcccttctcgttggcttttctgacgttgcaggcgacgatgtcgaccccccagtggcgcgcggcatcgaggtaacgcggattgaacaccggcgcctgaccaatcagccgctgcagcaccgcggacttcagattgtctaccatgaccttgcgcgggcagccatggaaggccgcgaacgcatgctcatgacaggcga

SEQ ID NO: 38449 - DNA, 260 bp, Unknown
  Description of Unknown: RightRegion for integrase A1017 sequence
attaatcacctcgatctgagaatcattcagcctcaccaggaggggcatcaacatgcgtagtcgtgggaagggatcgattggcgtcgtcctgattggggtgcgccaccggcccgtgtcgggtgattttatcccactgaaaccactggtttttatggaaatttatcctgactcgtggtagtcaggatcatgtctagcgcgacgacaaatcttccggacgatccagcctttctcaaggcaatgattgccgctttacaggcgga

SEQ ID NO: 38450 - DNA, 260 bp, Unknown
  Description of Unknown: RightRegion for integrase A1018 sequence
attaatcacctcgatctgagaatcattcagcctcaccaggaggggcatcaaaatgcgtagtcgagtgaggggatcgattggcgacacccgtcgtggacttccgctcccggtcgaacgggataaaagctatattttgcaggggcatcgggggtatattgctggtgtgctaggggcaaatcggctagatttgcgggtatggaaacagcgccgctagacagtcaggatgagctaactgctttgcgcgcactcgtcgcagaaca

SEQ ID NO: 38451 - DNA, 260 bp, Unknown
  Description of Unknown: RightRegion for integrase A1019 sequence
attaatcacctcgatctgagaatcattcagcctcaccaggaggggcatcaacatgcgtagtcgccagatggacgttcaagaaaccacggcaagcatacccggacgccttcgccgaactggcgtcgccagcctgcacccacgacccgtacccgttcaagcggtggttgcgcgagcatgatccggtgcatcgcgcggcgtcaggcctctttctgttgagccgccacgccgacatctatcgcaagacacttcctgtcggcttt

SEQ ID NO: 38452 - DNA, 260 bp, Unknown
  Description of Unknown: RightRegion for integrase A1020 sequence
gtcaaccagctcgatctgagaatctgtcagcctcaccaggaggggcatcaacatgcgtgatcgctggagggaatcgactggcggctgccgcagcacacggcccggcccgaacgggcgggctgaaaagctgcagacaagagggcgtgggcatgattcaatacccccatgtccagccccaatccgtccgcccccactgccgacaatctgcccgccgatctggcggcggcccatgcgctgatcctggcattgcagggggagtt

SEQ ID NO: 38453 - DNA, 260 bp, Unknown
  Description of Unknown: RightRegion for integrase A1021 sequence
tacagttcgacagaaccgacttttatccctgttccatcaaccacacaaggtgcagtatgaagcgtacgccttatcacggggctttcttggccgtgctgggagcatcgctgtcgcgtagtggttcacgaattcctgcgccgtgcggccaagacccggttcgtatcggtcaggtcgtgcaatcaatgcgcgcggattatctgggaccagcaggctcggggcgcctccgtagaattccatggcgccgataagcccgccgatcc

SEQ ID NO: 38454 - DNA, 260 bp, Unknown
  Description of Unknown: RightRegion for integrase A1022 sequence
tatggaagcaggtcgccgacgctcatcgccgtttcatcaaccacacaaggtgcaatatgaagccttcgccttgtcctgcggcttgtaagggcgcgcgggcaggatcgccacgccgtagtgcgcggcgaactcggcggtggtgcgctgcagttgcggctcataccggtcggcttgaccgatgagcgagcgcgtattgtcgggcacgacgagctcgggcacgccgccgatgaaggccagcgcccgggcgagcgagcccagcc

SEQ ID NO: 38455 - DNA, 260 bp, Unknown
  Description of Unknown: RightRegion for integrase A1023 sequence
tatggtagccgccaaccccggttaattgacgctcaaccaacccaacaaggtgcatcgtgatgtctgctccttggcctgcggggtgttggcacagatgatgtcgatgttcagctcataaagcgcccggccgaactgcgtcaggccgctggtccggtccttctcggacgcatgggtggagcggaaaacgccgtgcttgtcgctgtagaaggccagcggcttgccccattgctgcagataggccttcgtcgcatgcagatagt

SEQ ID NO: 38456 - DNA, 260 bp, Unknown
  Description of Unknown: RightRegion for integrase A1024 sequence
tacagttcgactcaaccgacgtttatcgctgttccaccaaccgcacaaggtgcagtatgaagcgtatgccttgtcctgcggacgatatacgcgcgcaggaaggaatgatgtgccgtagtgacgcgcgaagtccagcacagtgtcgccggcgcgaggttcatagcgatcgggatcggcaatcatcgcacgcgggttatccgggacgatcaactgcggcacaccaccatagaaggtcagcgcgcgagcgatcccgcccagcc

SEQ ID NO: 38457 - DNA, 260 bp, Unknown
  Description of Unknown: RightRegion for integrase A1025 sequence
tatggtagccgccaaccccggttaatggacgctcaacaaatccaacaaggtgcatcgtgatgtctgctccttgtccttcgggcggcgcggccgggccggtaggacgccgacgccgtagtgggacgccatcatgccgtagctgcggttgatctcgggatcatggaagctggcgcggttgacgccggacttcaggttgtccggcacgatcagccggggcacgccaccgaagaaggcgaacatgcgcacgtgcgagccgatcc

SEQ ID NO: 38458 - DNA, 260 bp, Unknown
  Description of Unknown: RightRegion for integrase A1026 sequence
tatggtggccgtcaacccagattaattgtcgctcaaccactccaacaaggtgcatcgtgatgtccgctccttgtcgcgcggccggcgcggtcgcgtcggaagaacagcgcttccgtaatgcgctgccatgccggcataggtgcgattgacctgcggatcaaaatggcaggccttgatgacggcgaccttggcgttatcgggaaccagcagcgccggcgcaccaccaaaggcctcaagcgccagcaggtggcattcaatcc

SEQ ID NO: 38459 - DNA, 260 bp, Unknown
  Description of Unknown: RightRegion for integrase A1027 sequence
tatggtagccgccaaccccggttaattgacgctcaacaaatccaacaaggtgcatcgtgatgtctgctccttgtcacgcggacgtcggggccgcgtcggcaggacggcactgccatagtgagccgccatcgcgcaatatgtccggtttacctggggatcgaagtggcaggccttgatgatcgccaccttggcattgtcgggaaccagcaaggctggcgcaccgccaaagaactccagcgcctggatatggcattcaatcc

SEQ ID NO: 38460 - DNA, 260 bp, Unknown
  Description of Unknown: RightRegion for integrase A1028 sequence
tatggtagccgccaaccccggttaatggacgctcaacaaatccaacaaggtgcatcgtgatgtctgctccttgtcccgcgggcgtcgcggccgcgtcggcaagacggcgctgccataatgggccgccatcccgcaatacgtccggttgacctggggatcgaagtggcaggccttgatgatcgctaccttggcattgtcgggaaccagcaaggctggcgcaccgccaaagaactccagcgccaggatatggcattcaatcc

SEQ ID NO: 38461 - DNA, 260 bp, Unknown
  Description of Unknown: RightRegion for integrase A1029 sequence
tatggtagccgcaaaccccggttaattgacgctcaaccaatccaacaaggtgcatcgtgatgtctgctccttgtcccgcgggcgtcgcggccgcgtcggcaagacggcgctgccataatgggccgccatcccgcaatacgtccggtttacctggggatcgaagtggcaggccttgatgatcgctaccttggcattgtcgggaaccagcaaggctggcgcaccgccaaagaactccagcgccaggatatggcattcaatcc

SEQ ID NO: 38462 - DNA, 260 bp, Unknown
  Description of Unknown: RightRegion for integrase A1030 sequence
tatggtagccgcaaaccccggctaattgacgctcaaccaatccaacaaggtgcatcgtgatgtctgctccttcgactgtgggcttcgcaccggtgtcgtgcaaggttccatgccgatgtcgcggagcaaggatgcggtgtccctggcaacaaagcaggagccgttgtcggtgagccattcgatgggctcggacagcatgttgatgcggccgaagcggttctccactgctgtgatcacgaggtcctgcacgtcctggctgt

SEQ ID NO: 38463 - DNA, 260 bp, Unknown
  Description of Unknown: RightRegion for integrase A1031 sequence
cgcaaagcaacacaagcaaccttcatcgccgctccaactaccggacaaggtgcaatgtgaaacctactccttgctctgcggacttctgacaggtgtcgtgacgggcttcaggccgatttcccgcgagaacgtcagcgtctcgtcggcaatgtagcaggaaccgttgtcgctcagccactcgatttcgctgtcagccttcaacgcaccggcgaaacggttttcgaccgcctgaagcatcacgtcgcgcaccatgtcaccgg

SEQ ID NO: 38464 - DNA, 260 bp, Unknown
  Description of Unknown: RightRegion for integrase A1032 sequence
ggcaaaaccacaggcaaatcaaccacccgcgagggaagtttccccgcacataccgcatgaggtgcaatatgcagcacactccttctcattcccccgcgcgatcgccaccgggcgaggctcgtagcgataatgaccggcgaactgcagcaaggtgggattgaagcggatcgcctgcccttgtcgctcgaggacggcgctcttcaggttgtcgtacagcagcactctcgccagccccccccaagcgccaaacgccccgacat

SEQ ID NO: 38465 - DNA, 260 bp, Unknown
  Description of Unknown: RightRegion for integrase A1033 sequence
aacgacgttgaagggcaactcccaatgtttaccgaggtttcggaaggaggtgcacaatgaacgccccatcgcccatggtcgaatctggttctccagccagttattgtcgatgggcacgtgcccgtcatcgagatagcgcgtgagcgcttcccaacgcttcaggctgtagtcgagcgcctttgcgattgccgatccttcggcaacgagcttgcgctgggtcaccatccaggcgtgcaacgcatcggcaacgggtctggatc

SEQ ID NO: 38466 - DNA, 260 bp, Unknown
  Description of Unknown: RightRegion for integrase A1034 sequence
cccgaaattttagacactttacgagaaaaaattcgccgtgtgcctgttaaatctgaataataccagtttgatagtgagccggaaataatagtttgtatacggttaaccccttggagtaattttgtactcaaggggttttactgtatatagggtgagggcttttcaataaacttttcaccatcaaaatgccaagcaattccatctgggtcgtgaagagaagtccattgcccaaaatttggagcatttttcttatgacgaag

SEQ ID NO: 38467 - DNA, 260 bp, Unknown
  Description of Unknown: RightRegion for integrase A1035 sequence
cccgaagttttagagactttacgtgaaaaaatccgccgcgtaccagttaaatctgaataataccagtttgatagtgacccgaaaacaatagtttgtatacggttaaccccttggagtaattttgtactcaaggggttttactgtatatcgggtgaggacttttcaataaatttttcaccatcaaaatgccaagcaattccatctgggtcatgaagagaagtccattgcccaaaattggaagcatttttcttatgacgaag

SEQ ID NO: 38468 - DNA, 260 bp, Unknown
  Description of Unknown: RightRegion for integrase A1036 sequence
gccagacgatcacgtcgcccgatatctcgagatccgcagcaaaatctctttgctttataagggcatcaccagatgagcagtatgaagcgccaacgtcgcagccggcaaaaagagagttcttggcgttgagcttgatcggccgcatcgcacgctcgacagcattggtgtgtgtgccttgcaaggcgcactgttctccctggtggaaccccaggccggctaactctcgctccagccggaagtattcggggcgggtcaggagg

SEQ ID NO: 38469 - DNA, 260 bp, Unknown
  Description of Unknown: RightRegion for integrase A1037 sequence
gccaggcgatcaagacgtccgatatctcaggatccggttcaaaatccccttttattttaaggacatcgtcagatgagcagtatgtcgcgccaacgtcgctaccggcaaagagcgcattgcggcgattcatggctggtcggcggatcgcgttttccaccaggttggagtcgatatcgacgtggccgtcgtccagaaacagccggaatccgtcctgccgcgtcagcatataggccagggcttttccgaggtcggacttgcgt

SEQ ID NO: 38470 - DNA, 260 bp, Unknown
  Description of Unknown: RightRegion for integrase A1038 sequence
gccaggcgatcaagacgtccgatatctcaggatccggttcaaaatccccttttattttaaggacatcatcagatgagcagtatgtcgcgccaacgtcggagccggcgaagagccagttctttcggccaattgcaatgccccgttcattctgcccatgtcggcgatgaagttgaggttctttatcgctggcatccttattttggccagagggtttccattcgccgtgttgaagaacgagcgacaggccggtttttgaaggt

SEQ ID NO: 38471 - DNA, 59 bp, Unknown
  Description of Unknown: RightRegion for integrase A1039 sequence
gaatgggacgaatatgaacgcaaccaggcgctgctcgccgccaacgcctatgggcaaaa

SEQ ID NO: 38472 - DNA, 260 bp, Unknown
  Description of Unknown: RightRegion for integrase A1040 sequence
aaggattgggtgcgcacttcagggcatctacagcggcaacattccaacactcaactgtgagaggtgcattatgagatcaccgtcggaataccgagtggcctttcgccaccactagctttggggatccatacgcgcagcaagggctgaggccgataagtcttggcctttaactcttgctgcaatctttccagccagtcgtttcgtccatgttcttcgatatcctcgaaacgctctcgatcgactcccggcgcaccgcggtt

SEQ ID NO: 38473 - DNA, 260 bp, Unknown
  Description of Unknown: RightRegion for integrase A1041 sequence
cccaaacaccccgcgggatcacaccccgatcagaaaaacctatccctctcaacaacatagacaaatgggtcttatgaaacaggattgtagtcgtgacgccaggcggccagcacggacctcgcttgaggcaggctcgtgaacaaggtctcgttcagacactcgtcccggagccgggcgttgaagctctcgacgaacccgttttgctggggcttgccgggcgcgatgtaatgccattccacgttccgctctttcgaccagcg

SEQ ID NO: 38474 - DNA, 260 bp, Unknown
  Description of Unknown: RightRegion for integrase A1042 sequence
aagggtcgcccgtgtcgcgttgttgacgcggacatgcttccaatgtttacagatacttgaatacggagtgcataatgaaacacgcttcgcgatgcagcgcaacgcgcgttcggcagcattgttggtgaggcagatcctgccgtcgtcaaggaagcgggtgaacgcgtcccagcgcttcagcatgtagaggcaggccttggtcagatcatggccgcgcgacagcttggccacctgcgcggtgagccaggtgtggagctcgg

SEQ ID NO: 38475 - DNA, 260 bp, Unknown
  Description of Unknown: RightRegion for integrase A1043 sequence
cgcgattgggtacgcacttcagggcatcttcagccgcaacattccaacattcaactgtgagaggtgcattatgaaatcaccgtcgggatgccaagctcgcgctcgccaccttccgccttctggatcgtcacccgtcgtaccggactgggccggtacgtcccccgcagcagttcctcacggatacgaggccactcggacgccagtttgcgcgacgtctggtcaatgtccagcccgtccacacccgccgaccccttgttcgc

SEQ ID NO: 38476 - DNA, 260 bp, Unknown
  Description of Unknown: RightRegion for integrase A1044 sequence
ccaaaataccccacgggatcacatcccagtcaacgaagcctattttcttcaaccacatagacagatgggtgttatgaagcaggattgtaatgccgtcgccaggcttcgatcagcaccttggcctcagcgggctgtagaagatctcgccattgagcagttcgtcgcgaagcgacccgttgaagctttcattatagccattctcccatggtgatcccggtgcgatgtagagcgtcttcacgccgatcctggccaaccattgt

SEQ ID NO: 38477 - DNA, 260 bp, Unknown
  Description of Unknown: RightRegion for integrase A1045 sequence
aagggccgcccgtgtcgcgctgctgatgcgggtacgcttccaatgtttacagacacttgaatatggagtgcacaatgaaacctgcttcaccaaaggtctgattgcccgctcagcggcattgttgctcatctcaagccgcccgtcagtggcgtaaaccgtgagagccttccagcgggaggtcatatagcggatcgccttggccaattcgcttttgccgctgatgcgcgtgagcgtaggcgctgtcgagccggtcgcacttc

SEQ ID NO: 38478 - DNA, 260 bp, Unknown
  Description of Unknown: RightRegion for integrase A1046 sequence
aagggccgcccgtgtcgcgctgctgatgcgggtacgcttccaatgtttacagacacttgaatatggagtgcacaatgaaacctgcttcgccaagggccggatcgcccgttcgactacattgctgtcgatctcaatccgcccgtcgtcgacaaaccgcgttagcccgtcccagcgcgagagcgcgtagcggatcgcctcggccagcttgctcttctggctgatcagaccgagcttggcgcgcaaccacggctcgagagctt

SEQ ID NO: 38479 - DNA, 260 bp, Unknown
  Description of Unknown: RightRegion for integrase A1047 sequence
ccaaaataccccacgggatcgcatcccgatcaacaaaccctattttcttcaaccacatagacagatgggtgttatgaagcaggattgtaataggtgatccatcggccaagaccagccttcagctccgatccggtctcgaaggcgtggaggtagacgcactcatacttcaaagatcgccagaggcgctcgatgaagacgttgtccatccatcgcccccgaccatccatgctgatgcggatttcagcgtcgcgcagcacgct

SEQ ID NO: 38480 - DNA, 260 bp, Unknown
  Description of Unknown: RightRegion for integrase A1048 sequence
aaaggtcgcccgtgtcgcgttgccgacgtggacacgcttccaatgtttacagatacttgacgagggagtgcataatgactcacgcatcgcgattgggcggattgaccgctcgacggtattggagtcgagctcgatgcggccgttttcgaggaagcgcgagagtccttcccatcgggagagcgtgtagcggatcgcctcggcgagcttggtcttctggctgatcaggccgagcttttcgcgcagccaaggctcgagctcag

SEQ ID NO: 38481 - DNA, 260 bp, Unknown
  Description of Unknown: RightRegion for integrase A1049 sequence
aaggcgcgcccgtgtcgcatcgccgacgcggagacgcttccaatgtttacagatacttaaagaaggagtgcgcaatgactcaggcccgccaagcggacgcatggctccttcagctatgttgttatcgatttcgacacggccatcgtcgatgtaaacgctcaatgctgcccatcgcgagagggcatatcgcattgcctcggcagcttctgcttttgtggcagcgtcgaaagcgtctcttctatccagctcttgagatccgc

SEQ ID NO: 38482 - DNA, 260 bp, Unknown
  Description of Unknown: RightRegion for integrase A1050 sequence
acagatcgcccgtgtcacgccgacggcgggaagcagatctcaatgttttcaagcacttaacgaagaggggcactatgagcaggtcattgccacaccgcgcagggcgcgctcggcagcgttgttgtcgatctcgatgcggccatcgtctcggtaacgcgtgagcgatttccagcgtgtcagcgagtagccgatcgccttggccagttccgacttcgtggacaccttgcccagcatgctcgtgagccaggcacgcaggtctt

SEQ ID NO: 38483 - DNA, 260 bp, Unknown
  Description of Unknown: RightRegion for integrase A1051 sequence
cccagacacccggcgggatcgcatcccgatcagcaaaacctcttttcttcaatagcatagaaagatgggcgttatgaagcatcgttgtacaacggtggttgcggggacccacataagccgagcccgacacttgttgtctgctgctgtataaacgctcacgacgaaagccttcttcggccccaaagcccttgggcgaccttctctcgtcgtcatagctggcgacatgacatcgaacgtctcgacctgatgggaagtactcg

SEQ ID NO: 38484 - DNA, 260 bp, Unknown
  Description of Unknown: RightRegion for integrase A1052 sequence
gcgcggcgcctcagacgtccgccgtccggcaatccgctacaaaaagaactggaactctaacgagatagaaaggtgagcattatgaagcgggctcggttgccccggtgatgagcaaattctcgttgcggcggatccagtcaccgacgatgagcctggcgaagacggcgcgatcgatgccgcgtggcgtgcgccaatcgacatcttccacgcatgcggtctggcgcagcgcggcgaacttgaggcgggtcgtaagacgtttg

SEQ ID NO: 38485 - DNA, 260 bp, Unknown
  Description of Unknown: RightRegion for integrase A1053 sequence
acactcagcccgtgtcgggccgtcagcgagaagcagatgtcaatgttttcaagcacttaacgaagaggggcattatgaacacgccattgcccatggccgaatcagattttcgagatggttgttatcaatctggacgttgccgtcggccagataagttgtcagcgcttcccagcggttcaggctgtagtcaatcgctttggccgtggcactgccctcgggcacgcgttgcctctcccgcttcagccaggcgtgcaggtcct

SEQ ID NO: 38486 - DNA, 260 bp, Unknown
  Description of Unknown: RightRegion for integrase A1054 sequence
aagggccgcccgtgtcgcattgctgacaccgagacgcttccaatgtttacagatacttaaagagggagtgcacaatgactcaggtacggcaacgccgcgcagggctcgttcggcggcattgttcgtcagacacagtctgccgtcgtcgaggaaccgggcgaaggcttcccagcgaccctccttctcgaacatgtagttgatcgcctcggcgacggggttgtgcttcgacatttgcccgcgctgggccatgagccaatcgt

SEQ ID NO: 38487 - DNA, 260 bp, Unknown
  Description of Unknown: RightRegion for integrase A1055 sequence
aagggccgcccgtgtcgcattgctgacaccgagacgcttccaatgtttacagatacttaaagagggagtgcacaatgactcaggtacggcaacgccgcgcagggctcgttcggcggcattgttcgtcagacacagtctgccgtcgtcgaggaaccgggcgaaggcttcccagcgaccctccttctcgaacatgtagttgatcggctcggcgacggggttgtgcttcgacatttgcccgcgctgggccatgagccaatcgt

SEQ ID NO: 38488 - DNA, 260 bp, Unknown
  Description of Unknown: RightRegion for integrase A1056 sequence
aagggccgcccgtgtcgcatcgctgacacggagacgcttccaatgtttacagatacttagaaaaggagtgcacaatgactcaggtccgcctatcggacgtagtgcccgctcggcggcattgttgtcgatcgcgacgcggccttcttcgaggaacagacagagcgaagaccatcggctcaatccgtagcggaaagctgtcgccagatcgcttttgcccggaatgcgcgtgagttgagcttcagcccagtggcggaatgcat

SEQ ID NO: 38489 - DNA, 260 bp, Unknown
  Description of Unknown: RightRegion for integrase A1057 sequence
aaaggacgcccgtgtcgcgttgctgacccggatacgcttccaatgtttacagacacttagagaaggagtgcacaatgactcaggtccgcctatcggacgcagtgctcgctcagcggcattgttgtcgatggcgacacgaccgtcttgcaggaacaggcagaacgaggaccatttgctcaaaccgtaccggaaggctgccgccgatcgcccttgccaggaatgcgagtcagttgagcctctgcccagatgcggaatgcttc

SEQ ID NO: 38490 - DNA, 260 bp, Unknown
  Description of Unknown: RightRegion for integrase A1058 sequence
aagggccgcccgtgtcgcattgctgacacggagacgcttccaatgtttacagatacttagagaaggagcgcacaatgactcaggtccggcgaagcctcgcaacactcgctcggcagcattgttcgtgaggcagatcctgccgtcttccaagaatgacgcgaagccgtcccagcgcttcagcatgtaatcgatcgcctcggcaaccggagagctgcgcgacagccttgcccgctcggcccgcagccattcctggaactcta

SEQ ID NO: 38491 - DNA, 260 bp, Unknown
  Description of Unknown: RightRegion for integrase A1059 sequence
aagggccgcccgtgtcgcattcccgacacggagacgcttccaatgtttacagatacttaaagagggagtgcacaatgactcaggtccggcgctaaaccggaagaatgctctcttcgctggtcatcacaccggagctgagaattgggcgaccatcgcctcgctgatcgagacgtgcaagctcaatgccgtcgatccgtttgcgtatttgaccagcacgctcaccgccatcgttaacggccacaagcagagccagattgagg

SEQ ID NO: 38492 - DNA, 260 bp, Unknown
  Description of Unknown: RightRegion for integrase A1060 sequence
aggagcgaacacagtccattatcacaatcacaggatcagcagatccagctttttcaataacatagcgaggtgtgcattatgtcgtgggatcgctgggaccgagagcaatgacgttctcgcgtcgctcgatccactcgcatcgggccaactccagcacctgcatcttgttgagcttcgggatagcggcgaagtcgaaactgtcgaggcttttgacgaccgggaatttggccgccttgatccggcgatcgacctttcggcga

SEQ ID NO: 38493 - DNA, 260 bp, Unknown
  Description of Unknown: RightRegion for integrase A1061 sequence
aagggtcgcccgtgtcgcaccactgacacggagacgcttccaatgtttacagacacttagagagggagtgcacaatgactcaggtccgccaaaaactctgatgtcgcgctccaggaggttgttgtcgatcggcatcctgccatcgtccgtgtagcgcgtcagataatcccactggttcagagtgtaggacacggcatcgcccagcttggtgtccggcaagaccttcggcgcgatttcatcgagccataccttgagagcgg

SEQ ID NO: 38494 - DNA, 260 bp, Unknown
  Description of Unknown: RightRegion for integrase A1062 sequence
cacagaggcccgtgtcgcatcaaaatggaaaaccaaaagtccctgtttccggacatttgaagaggaggtgtagtatgaatcggtcgttgccacgcatcgcatggcacgctccgcaatgttgttatcgatctccagacgcccatcatcgaggaagcgcgtgagcgccacccagcgcttgcggccataggcgatcgctttcgccatctcggacttgggcgagaggcggcgcagggcatcgtcaagtgcttgccgcagctcat

SEQ ID NO: 38495 - DNA, 260 bp, Unknown; identical to SEQ ID NO: 38487
  Description of Unknown: RightRegion for integrase A1063 sequence

SEQ ID NO: 38496 - DNA, 260 bp, Unknown
  Description of Unknown: RightRegion for integrase A1064 sequence
tacagaggcccgtgtcgcattaaaatggaaaaccaaaagtccctgtttccggacgtttgaagaggaggtgcataatgaaccagtcgttgccgcctcgcgaatggcggtgctgtcatagcctttgtcgccgagcagggtagcgccctcggggatggcctctatcagcgcttcagcttcgcacgcatcatggacctgcccacccgtcagtcgcaggccgacaggacgcccataagcgtcgacaagagcgtggagtttggtcg

SEQ ID NO: 38497 - DNA, 260 bp, Unknown
  Description of Unknown: RightRegion for integrase A1065 sequence
tacagaggcccgtgtcgcattaaaatggaaaaccaaaagtccctgtttccggacgtttgaagaggaggtgcataatgaaccagtcgttgcaaaaaccctgatgtcgcgttcgagaagattgttgtcgatcggcatcctgccgtcttcgacgtagcgcgtcaggtattcccactggttgagggtgtaggagaccgcatcgccaagcttggtgtcgggcacaaccttgggcgcgatggcatcgagccatgccttgagggcat

SEQ ID NO: 38498 - DNA, 260 bp, Unknown
  Description of Unknown: RightRegion for integrase A1066 sequence
caaaagctcaaagccggcaaggtggaccgcctctctcccgtccctcggttggcttgttgaggagggcactaagatgcgtgatcgaacatcttgttcgcgtacatgtcgacgaccgggtgctcatatccgtcgagagccttcgtctcgagagcggtgtagacctcggtgaacgccatcgggacggcgttgagtcccatcgcattgaagctggccagggccatcgggctttgcatcacgcgaaccttgagccctttcatgtc

SEQ ID NO: 38499 - DNA, 260 bp, Unknown
  Description of Unknown: RightRegion for integrase A1067 sequence
tacagaggcccgtgtcgcatcaaaatggaaaaccaaaagtccctgtttccggacgtttgaagaggaggtgcataatgaaccagtcgttgcaacgctgcgcagttggcgctccgcagcgttgttcgagagacatatccggccatcggcgaggaaggtggtgaagcccgcccagtcgttctggaggtaggcgatggccttggccacggcatcgtgacgagagagcttgctacgcgtctcacgcatccatgcctctagttcag

SEQ ID NO: 38500 - DNA, 260 bp, Unknown
  Description of Unknown: RightRegion for integrase A1068 sequence
aacggtggcccgtgtcacctcgaaacgcaaaatcaaatcccaatgtttccaaatacttgagaaggaggcgtacaatgaatcagacatcgcaaaaatcctgatgtcacgctcaagaaggttgttgtcgatcggcatcctgccgtcttcggtgtagcagtgttggtttccacgcagaactgagccggttccaacctttcctcgcgtgttttcagcgtgatccgacgctggcatcgtcgagagcatctatcgatccgggagat

SEQ ID NO: 38501 - DNA, 260 bp, Unknown
  Description of Unknown: RightRegion for integrase A1069 sequence
cctagataccccacgggatcgcctccagatcaggaaaatctattcccttcaacaacatagaaagatgggcgttatgaaacaggattgtaatcgtcgacccattcggcgatggcgctgcgggcatggccgagaccgaagaacaggctttcgttcagcagttcgtcgcgcatccttccgttgaggactcgacataaccgtgtctcacatcggctttcccggtgcgatgtagtgccagtcgaccttgtggtccttcgcccagg

SEQ ID NO: 38502 - DNA, 260 bp, Unknown
  Description of Unknown: RightRegion for integrase A1070 sequence
cctcgccaccccgcgggatcgcctccagatcaggaaaacctattcccttcaatgacatagaaagatgggtgttatgaaacaggattgtaatcgctgcgccagtttgaaagcgctgatcgagcgtgggtcaatgacgagaagagcgtttcattcaagagctcgtcgcgcagccgaccattgaagctttcgatgaaggcgttctggatcggtttgcctggtgcgatgtagtgccaatcgactttggtccggtcggcccattg

SEQ ID NO: 38503 - DNA, 260 bp, Unknown
  Description of Unknown: RightRegion for integrase A1071 sequence
cctcgccaccccgcgggatcgcctccagatcaggaaaatctatttctttcaatgacatagaaagatgggtgttatgaaacaggattgtagtcgtccgcccattcggcaatggcgcttcgggcatgatcgagaccgaagaacaggctttcgttgagcagttcgtcgcgcatccggccgttgaagctctcgacatagccgttctgcatcggcttccccggcgcgatgtagtgccagtcaaccttgtgatccttcgaccaagc

SEQ ID NO: 38504 - DNA, 260 bp, Unknown
  Description of Unknown: RightRegion for integrase A1072 sequence
ccccgacaccccgcgggatcgcctccagatcaggaaaacctattcccttcaatggcatagaaagatgggtgttatgaaacaggattgtagtcgtttctccagtcttcgataatctccctcgcatggcggtagctggtgaagaggtgctcgttaaggcattcatcgcgcagcctaccgttaaagctctccacaaagccattttgcatgggcttgcccggcgcaatgtagtgccactcgacggcgtggtcctgttgccattt

SEQ ID NO: 38505 - DNA, 260 bp, Unknown
  Description of Unknown: RightRegion for integrase A1073 sequence
cccagacaccccgcgggatcgcctcaaaatcaaggaaacctatttacttcaacaacatagaaagatgggcgttatgaaacaggattgtagtatctacgccaatcctccatcttttcgcgggcatccgcaagggtcaggaaccaatcctggttcaggcattctgcacggaagcggccattgaacgcttcgatgaaagcattatcagtcggcttgccggggcgtgagaagtccaacgtcacacccttggaataggcccacag

SEQ ID NO: 38506 - DNA, 260 bp, Unknown
  Description of Unknown: RightRegion for integrase A1074 sequence
cctcgccaccccgcgggatcgcctccagatcaggaaaatctattcctttcgatgacataggaagatgggagttatgaaacaggattgtagtatctacgccaatcctccatcttttcgcgggcatccgcaagggtcaggaaccaatgctggttcaggcattctgcacggaagcggccattgaacgcttcgatgaaagcattatcagtcggcttgccggggcgtgagaagtccaacgtcacacccttggaataggcccacag

SEQ ID NO: 38507 - DNA, 260 bp, Unknown
  Description of Unknown: RightRegion for integrase A1075 sequence
cctcgacaccccacaggatcgcatccagatcaggaaaacttattcccttcaacaacatagaaagatgggcgttatgaaacaggattgtaatcgtccgtccattcagcaatggcgcgcttcgggcatgatcgaggccgaaaaacaggctttcgttgagcaactcgtcgttgttgcgaccccagggaatcatcggttcaacccaaaagccagagcgtttttcagcagcctgctagaccgtctttccgacacatgtccttcac

SEQ ID NO: 38508 - DNA, 260 bp, Unknown
  Description of Unknown: RightRegion for integrase A1076 sequence
cctcgccaccccgcgggatcgcctccagatcaggaaaacctattcccttcaacaacatagaaagataggcgttatgaaacaggattgtactctctacgccaatcctccatcttcgcccgcgcgtcgtcaaggctcatgaaccaatgagcgttcaggcactcggcgcggaacttgccgtagctttcgatgtagctgttgtcggtgggtttgcctggtcgcgagaagtgaagcaggacacccttgtggtaggcccacaggtc

SEQ ID NO: 38509 - DNA, 260 bp, Unknown
  Description of Unknown: RightRegion for integrase A1077 sequence
cctcgacaccccacaggatcgcatccagatcaggaaagcttattcccttcaacaacatagaaagatgggcgttatgaaacaggattgtaatcgctgcgccagtctgaaagagctgatcgagcgtgggtcagtgacgagaagagcgtttcattcaagagttcgtcgcgcagccgaccattgaagctttcgatgaaggcgttctggatcggtttgcctggtgcgatgtagtgccaatcgactttggtccggccggcccattg

SEQ ID NO: 38510 - DNA, 260 bp, Unknown
  Description of Unknown: RightRegion for integrase A1078 sequence
cccaggcaccccgcaggatcacatcccgatcagaataccctattccctacaacagcatagacagatgggtgttatgaaacaggattgtaatgccggcgccaggcttcgatcaggatctgggcttcagccaaggtgtagaagatctccccgttcaagagttcgtcgcgcatcgagccattgaaggactcgcagtagccattctcccatgggctgccgggtgtaatgtagagcgtcttcacaccgatcctggtcagccattc

SEQ ID NO: 38511 - DNA, 260 bp, Unknown
  Description of Unknown: RightRegion for integrase A1079 sequence
ccgtcggtacgccgtccggtaacagacgatccggatcagcagacctttgattttcaatgacgtagcgaggtgggcatcatgacgcgggaacgggctggccgaggaaatggaccacctcgtgccggtcgacgaagtcgagctgcgccaaggtcatgatcctgtcgcggtcgagcgaaggctggaaggagaagtcgaagccggtgagcgtcttgatggagagaagccggcccatcttcagggctgccttgatgcggcgcccc

SEQ ID NO: 38512 - DNA, 260 bp, Unknown
  Description of Unknown: RightRegion for integrase A1080 sequence
cctcgacaccccacaggatcgcatccagatcaggaaaacttattcccttcaacaacatagatagatgggcgttatgaaacaggattgtaatcgctgcgccagtctgaaagagctgatcgagcgtgggtcagtgacgagaagagtgtttcattcaagagttcgtcgcgcagccgaccattgaagctttcgatgaaggcgttctggatcggtttgcctggtgcgatgtagtgccaatcgactttggtccggccggcccattg

SEQ ID NO: 38513 - DNA, 260 bp, Unknown
  Description of Unknown: RightRegion for integrase A1081 sequence
ctcgcaaaaggagtcggcggccgatatggtagccgccaaccccggttaattgacgcttgacaaatccaacaaggtgcatcgtgatgtctgctccttgtcacgcgggcgtcgcggccgcgtcggcaagacggcgctgccataatgggccgccatcccgcaatacgtccggttgacctggggatcgaagtggcaggccttgatgatcgctaccttggcattgtcgggaaccagcaaggctggcgcaccgccaaagaactcca

SEQ ID NO: 38514 - DNA, 260 bp, Unknown
  Description of Unknown: RightRegion for integrase A1082 sequence
cgccaacaaacgcaaactgagccaagaacatcaactggcgaggaaagaggtgtagtatgaacgctgatcgttgtatgccatcaccagaccgctgccatcccagtagatcagcttcaaccggtccgcacagtgcgcttcataatgcatccctccatcagattccgggcaaccggacgactttatcgtattgataatcttcataaaacttcgggcgtcgatcgatgacaccctgcacccctatccggacggcttccgaggat

SEQ ID NO: 38515 - DNA, 260 bp, Unknown
  Description of Unknown: RightRegion for integrase A1083 sequence
aaagggcgcccgtgtcagtcgccgccggaaagtcaaattccaatgtttacagatacttgaagagggggtgtataatgaacactgcgttccaaaaatcctaatatcgcgttcgagaaggttgttgtcgatcgacatcctgccgtcttcggtgtagcgcgtcaggtattcccactggttcagggtgtaggatacggcgtcgccgatcttgctatcgggcaagaccttcggcgcgatgtcatcgagccatgccttgagagcga

SEQ ID NO: 38516 - DNA, 260 bp, Unknown
  Description of Unknown: RightRegion for integrase A1084 sequence
gcccgccgtctgagacgtccgccgtccagtaacccgctgcaaaaaactcttgaactttaacgacatggacaggtgagcattatgaagccggctcgctgggaccaagcgcaatgacattctcgcgccgctcgatccattcgcaacgcgccagttccagcacctgcatcttgttgagctttgggatggcggtgaagtcgaagctgtccaggcttttgacgaccgggaaccttgccgccttgatgcggcgctcgaccttgcgg

SEQ ID NO: 38517 - DNA, 260 bp, Unknown
  Description of Unknown: RightRegion for integrase A1085 sequence
cgtgttaagttcatcaacggaaagacggtcaaaagtgaaaggagcaccaaccatgagtaatataaagacagcggcaaacgtgacacttatccctgcaaaggagcaggcaaacagcgtatttacaggcaaaaagctgaaagtggcggcttattgcagggtcagcacagacgaaaccgagcagatgaacagcttcggagtacagatcgcgtactacaccgactacatcggcagccgacccgactggcagatgatcggcattt

SEQ ID NO: 38518 - DNA, 260 bp, Unknown
  Description of Unknown: RightRegion for integrase A1086 sequence
gccagcgacctggctgggactgtcaggaattctgtgcggtgggccggtttcatcagttgaagaaccgctcgccaaagatgacggcgaactgtgtctttgcctcgacccattcccgcggcgcccgtttccattgctcggccgcgttgttaagaacgagatataacagcttcatcgcggcttcgtcaccagggaaatgcccgcgggaacgcacagctcgccgaagcttcgagttgagggcctctattgcgttcgtcgtgtag

SEQ ID NO: 38519 - DNA, 260 bp, Unknown
  Description of Unknown: RightRegion for integrase A1087 sequence
atgagtcagcttcgcaaccgggtacgacgcaccaagcgttcgaagaaggaggcatcatgaagtcatcggctcgccgatcagcgcgtgccattgatcgacggggagctggctggtgacgatggtggagcggtggccgtagcggtcctcgaggatctccaggaggtcgtggcgggccgcggcgtcgagcggctcgaggccccagtcgtctgatggcaagcacaatttggcacttcgaacgacttggacggctgcgatcgtat

SEQ ID NO: 38520 - DNA, 260 bp, Unknown; identical to SEQ ID NO: 38469
  Description of Unknown: RightRegion for integrase A1088 sequence

SEQ ID NO: 38521 - DNA, 260 bp, Unknown
  Description of Unknown: RightRegion for integrase A1089 sequence
acaaagacgcgcaagtcgaaaccactacccaaaccggcccgcacgcctcgaatgaaatgagcgcaagcgaattcggataataaggcggcccctatcgtgggccgctttttattcgtcgtcgctatcctgcaagagtccttcgggcgtagagtagatccgtaataggctttcgccgacaaggacctgtcggtacgataggatagccaagtcccaaatttcttgtgctacttctggccccgcgtcgaggactttgccatctt

SEQ ID NO: 38522 - DNA, 260 bp, Unknown
  Description of Unknown: RightRegion for integrase A1090 sequence
aatctgggcggtgcggcgaagttactcgggataacgccaaagggtgatgtcacgttgtgagcggcttaacggttgtcggataatgggttgggatgaacagtcctgccgtcagctacaagaaccaccgctttccaccgcagatcatcgcccgtgcggtctggctgtatttccggttccctttgagcctgcggatggtcgaggaaatgttgttggagcgcggcattgtcgtctcctatgaaacgatccggcgatggggccgc

SEQ ID NO: 38523 - DNA, 260 bp, Unknown
  Description of Unknown: RightRegion for integrase A1091 sequence
ttcgtcccggtcagcagtttaccgcagagagagccgatgaaaggagtacaaacagcatgaatatcacttacacacagaacggcgattatcttatcccgaacatcattatccgcaagaccaagcccctcgggcactacggcagactccgcaaagcgtatctggaaatgcaccgtccgatactgttcaatgagctggtactatccgacaagctctttgagcattgcgccgagattgacgaagcggcacgaaatcgcatggag

SEQ ID NO: 38524 - DNA, 260 bp, Unknown; identical to SEQ ID NO: 38523
  Description of Unknown: RightRegion for integrase A1092 sequence

SEQ ID NO: 38525 - DNA, 260 bp, Unknown; identical to SEQ ID NO: 38434
  Description of Unknown: RightRegion for integrase A1093 sequence

SEQ ID NO: 38526 - DNA, 260 bp, Unknown
  Description of Unknown: RightRegion for integrase A1094 sequence
cgcatgacgctgtatcgtcgcctgcaacggttagggattcaactgcccgagcggcagtagagacgggccagcctggctggcccgtgcgtgatcactgtggcggacgtaccagaattttgacctgctgtttctctttcaccagcgcttcaaagccctgttcaaccagatcagccagttcaatacgtttcgtcaccagtttgtcagcctggaagtagccctgcgccatcagttccatcactgccgggaagatatggcgatag

SEQ ID NO: 38527 - DNA, 260 bp, Unknown
  Description of Unknown: RightRegion for integrase A1095 sequence
aaacgcctcctgatccgcggcgaacccgcccagccacgaccgagcgaaccgaaggactgaaggggagggggattggtccgacgatccagaggaggatcgcaggagaccccccatgcccatcacgatcgaccttggcggcgcccccgccaacgaagactgtgcccagctcggccacacacccgatttcgccgccgtcaatcgcctggaggtcgacgcctaccgcgccgccctgattgcgctgttcggaacgccgcccgaag

SEQ ID NO: 38528 - DNA, 260 bp, Unknown
  Description of Unknown: RightRegion for integrase A1096 sequence
agctctgttgtccaaactaaacacagaacatcatttagatatagaaataggggaagatgaattatctgaaattgacttttcaaaagacgcaacttatggagaaattaaaaagtatgtgttagataaatacggactaaaagtttcaagcctatatatcgcacaagtaaaaaggaaacatggtctaatagagagagaaaattataattttagtaagaaagaaaatcaaagagtgccaaattgcccagaagaaaaagaaaaag

SEQ ID NO: 38529 - DNA, 260 bp, Unknown
  Description of Unknown: RightRegion for integrase A1097 sequence
gcctgcaaccgaagaaaattgctgcttgtcagcgggttcgttgaaaggctcgttgcatgacatagtcgattgataaacagtcgtttttatcaatattttgtctcgcctcagccttgccggtcagaccgtgtcagtcagccagtcctccgttcgaagaccctccacccgctgaaattcccgcagattgccggtcaccacaatcagccctttgctccgggcatgcccggcaatcatgagatcatacggacctatgatacggc

SEQ ID NO: 38530 - DNA, 260 bp, Unknown
  Description of Unknown: RightRegion for integrase A1098 sequence
tgcgccggatgggccggcgccgagcctcccgcacaggggacgagccatgcagcagaatagcaaagtgtttgtcggtctggatacgtccaaactgaagatcgcggtcgccgtggctgaagacggccgtcagggtgaagtccgttttctgggcgagatcgacaacacgcccgaggcagtgcggcgcctcgtcagtaagctcagtggcaagcatcgcgagttgctgttctgctacgaggccggcccgaccggctatggcctgc

SEQ ID NO: 38531 - DNA, 260 bp, Unknown
  Description of Unknown: RightRegion for integrase A1099 sequence
gagggctgcaaatccttgcacctgacggcaaaggaagcggtggcgcggaacggcttatgaggcttcgtgccaatgggatcaggcactttgtctagcatgtgtcccaaccacaggatggtccggagtgggtctcgcagtgatattctcagagaattcgacacgtccggtttcgtgaggattgctgcctttgggcttacgtctcaggggtgccagaactagacgttccttggttcaaggaaatgcgtcagccgttcgagccc

SEQ ID NO: 38532 - DNA, 260 bp, Unknown
  Description of Unknown: RightRegion for integrase A1100 sequence
gttgacaaattagtgttggttgcgggggcaggatttgaacctgcggccttcaggttatgagcctgacgagctaccgggctgctccaccccgcggccgttttgcgtcttgagcgattgtttgcttctgacgcggatgattttgatcgttctggagatttcgtttcttttcaggtctggcggcgacctactctcccacgtcttgagacgcagtaccattggcgcgacggcacttaacggccgagttcgggatgggatcgggt

SEQ ID NO: 38533 - DNA, 260 bp, Unknown
  Description of Unknown: RightRegion for integrase A1101 sequence
gatgtgctgcattcagagccgaagtgcgagtgtagtaaatggaaaatggaattgatttagaaaacgacttggtggcgtttctgaaagatatagtcaaaaatgatcatgattatatttctgaagttatagcagagtctcacagtattttttctctgaatgggaacaggaatggagacgaggaggattatacatatcttgaagatgattacaactgaatcaaaagtataaaacaatgaaaggaaatgaaaattatgtctgaa

SEQ ID NO: 38534 - DNA, 260 bp, Unknown
  Description of Unknown: RightRegion for integrase A1102 sequence
gacataccaaaaccggcaaaggcaaaggcaaaggcaaaacagaaaaagaaaacggtctgaatctgaatcagaacgccatgccgggtggtattggcatggcgtcagaaatgcattcagcgcagaaacgttatttttttctgcttcttcaaggaggtgaacaacatagtcccacaagccgatgttcatcttcttggcagacaaaaggaatttattcaggtcattgtgttcatgaacaagcaagtatgactcaaggcttcttg

SEQ ID NO: 38535 - DNA, 260 bp, Unknown
  Description of Unknown: RightRegion for integrase A1103 sequence
ctgaaagacataccaaaaccggcaaaggcaaaggcaaaacagaaaaagaaaacggtctgaatctgaatcagaacgccatgccgggtggtattggcatggcgtcagaaatgcattcagcgcagaaacgttatttttttctgcttcttcaaggaagacaaggcaacacgcgaaggcagattattcgccatcaatacgcaagcctgtttgaagcatctgcataacagccagattaatcacagcggccctgctttgcccaagat

SEQ ID NO: 38536 - DNA, 260 bp, Unknown
  Description of Unknown: RightRegion for integrase A1104 sequence
cccgagcaagtaaagatggttgcggggacaggatttgaacctgtgaccttcaggttatgagcctgacgagctaccgggctgctccaccccgcggtggtttgttatcgttcagagattgagcttctcgtcaggtctggcggtgacctactctcccacgtcttgagacgcagtaccattggcgcgccggcacttaacggccgagttcgggatgggatcgggtgttttgctcgtgctatgaccaccagacctgaggagaagct

SEQ ID NO: 38537 - DNA, 260 bp, Unknown
  Description of Unknown: RightRegion for integrase A1105 sequence
agcatgaacgagaaatatgacataacatatcatgtggtagatttgagggaacaagaatgaatgcagtagagataattgatttcaataaacttgagtcaaaagatagattaaagaatgtttgtgcttatgctagggtttcaacaaaaaaagaactccaagaaacttctctagacttacaagttgaaacatatacgaaaatgataatggataatcctaaatggaacttcgttggtgtttattctgatgttgggaaaagtgga

SEQ ID NO: 38538 - DNA, 260 bp, Unknown
  Description of Unknown: RightRegion for integrase A1106 sequence
ttccgcatcgagatcacgggcgacctgctcaccttccttctgccgtccgcgtcaaagtagggcactgacggcaccacgccaccgaagcctccccacggggaggcttcatgcatttcggcgtccaggtcgctcggatttcgcagcaatctcaacacgctgaggcggaaccgcgccatctgccaggagtcccgccgaaacccgtagatttcgggggtatcaggggcatgataccaaccagatgatctcccgcctcgcagagg

SEQ ID NO: 38539 - DNA, 260 bp, Unknown
  Description of Unknown: RightRegion for integrase A1107 sequence
gaagtggtagcgggagagggctaccgccaattcaccgctgctaccgagttcgtctgttgaatgtactcgcaagcagggacgacagaatcacatcctgtcccctggctgtggtggccggctgatttgaactgtcatcagaggcccgcaaagttcccgtaaaccagacatgcaaacgataacacttgaggccgcggttgcgccaggttcggtgaatcttccatgtgccgcacgccaccttggctcccggccttcattgtcgt

SEQ ID NO: 38540 - DNA, 260 bp, Unknown
  Description of Unknown: RightRegion for integrase A1108 sequence
ggaatgtcggtttcggtggttgcgggagtaggatttgaacctacgaccttcaggttatgagcctgacgagctaccgggctgctccatcccgcgacacgtggttgccccttggttttggggtaacgcaaaaaaggcggctttggggccgccttttttgacaatgtgaatgggtttttgctgattttgcgcgagcttcaatgcctggcgacgccctactcttccagtgcttgagcaatagtaccatcggcgcagactggttt

SEQ ID NO: 38541 - DNA, 260 bp, Unknown
  Description of Unknown: RightRegion for integrase A1109 sequence
aatataagtttggacaatgatgaacaagttgaggctatagcgttgatacaaaagatgtaaatttagaaatccttcatttcaagcaattttataagcattttgtcttcgataaagatgaagaaggatacgtcaaaaagactcaaaaaaacttcatggatgtaagagttgttttgagactagtatgaggagacacaaagaaaaatttaataagataaactcattttgtactttctacaagagtggcttaaaaagctgctctt

SEQ ID NO: 38542 - DNA, 260 bp, Unknown
  Description of Unknown: RightRegion for integrase A1110 sequence
gcaggccgaactttgcaccattgtccaacacgtcctgatcctgcaccggatgtggcgtgacaacacggacttccggtggtcgcgccaggaagggcagcccgcatgagatagacacccaaagagatccgcctgatctggcggtacgatgtcccttgtcgggacgaggcagcagccatcgcgtgggcaccgttgcggcctgaaacctgaacctcagggagcagattgaccgcgtatgcaacatggcgaggctgaggcttccg

SEQ ID NO: 38543 - DNA, 260 bp, Unknown
  Description of Unknown: RightRegion for integrase A1111 sequence
ctttcgcaagaatcgttggttgcggggataggatttgaacctatgaccttcaggttatgagcctgacgagacggcatctgacgggatgctgccgcccgggcctcgtgcaaaagagcttgataattgattgaccacggtcgccgacgttatcgaggagacatccctctcgtcgaactttgatcggccagttgtggaaaccaaggggttacgctggatctggtagcggaggagggattcgaacccgctcgaccgctccctgg

SEQ ID NO: 38544 - DNA, 260 bp, Unknown
  Description of Unknown: RightRegion for integrase A1112 sequence
ggaaatacttatactccagacgaatacattttaatgattcaaaagactttaacaaaataacccctggtaactacaaaaggtttacccctcctgtagataagatataatgttctcaggaggatttatgactatttacgcctatacccgcgtttcaaaagccgaaaatgaaaccggcacgacaaataatcagattattaacattgaatcacaattaaagatagataacgtatattctgatgtcaatatttctggctcaatgc

SEQ ID NO: 38545 - DNA, 260 bp, Unknown
  Description of Unknown: RightRegion for integrase A1113 sequence
gccgccctccagagtgccgggagcattccgggccagatggcggggagcatggtctcgtgatgtacggctaccaccggaccaagggcgcccccatcgtcggcgccctcccggggcaggacggccccttcggccaccggcccgcgcccgacgaggacgacgacgccctcctggacatcgaggagccggacgccatggtgcccgcgccccgggacgggagcgggcggtgacgacgttgtggcggcaggtcctggccgcgctca

SEQ ID NO: 38546 - DNA, 260 bp, Unknown
  Description of Unknown: RightRegion for integrase A1114 sequence
acaccttacaagattagaaaaacactatttgaaacaacaagtaaaatttcatgcttttagctaattgtatcaagcagaaaactgtgttatattaaaagtgcgacatagtcgcaacttatcccttacatagcatgtgtgtatttacacacacatccccttccttaaggccaccgagaggtggtctttttattatgttttctatcaagttcaaatccgatagcgacctcaaaaaatagccattttaggcaaaagttcaaatc

SEQ ID NO: 38547 - DNA, 260 bp, Unknown
  Description of Unknown: RightRegion for integrase A1115 sequence
gtagaaacggcggcgttcggcgttcatagttctgttctgaaatggcgcgccatttgctgaattgccacccgcgttcaagaagcttcaatccatcttgctgcaacgccccggcggtgaccgtgacatggtggaaattctggcccttgtattgcaccacgatgaaggtgcggtactcagtgctgtggaattggcattggagtgtggcaagccatcgaaggagcatgtgcttaatctgttgggacgtttgaccgaagaacctc

SEQ ID NO: 38548 - DNA, 260 bp, Unknown
  Description of Unknown: RightRegion for integrase A1116 sequence
acccctatcctaaggtttaatttcatttttgacctcacagccactaataatttccactaagaaaagtagtaagtatcttaaaaaacagataaagctgtatattaagatacttactacatatctaacgaaaaaaagaagcttactctgccttcctttccagagcagcttctaataaatgttgagcaaattgtttataaaactcatctaagtcattacttgcttcatcctgagttatatatcgaatactgtaattttctttc

SEQ ID NO: 38549 - DNA, 260 bp, Unknown
  Description of Unknown: RightRegion for integrase A1117 sequence
accgaaatactgatcattttcaagggcggttatgaatgtaatgccgttgtggaaaagtgaataataacagcctgcgttcttgcgtatcagtaagcggcgcaggctgtttccgtcttagggcaagtatacggcacttttgatttttggcatgacaaaaaacgtccgaaagcagagccgtcaaacgttcgtaaaactctcaattttgcacttcaacccgaaaaaagtatgcaaatacacagctttttcaggactgatttgac

SEQ ID NO: 38550 - DNA, 260 bp, Unknown
  Description of Unknown: RightRegion for integrase A1118 sequence
aacgaggtgcagatcatcttcaaggatgggcatgaaatgaatgtggcggtagagaagtaatgttacatatgcaggaggtcacagcctacgatttttcggaagaaattagttgtgacctcttgcaattttgtttgatatagggtataatagaatagataaagtgtatcgtgttacgatcacggaggtgatttttatgggaacatatctcaatcccggcaacagcggatttgaggaagtgctgaatggtgactacattgata

SEQ ID NO: 38551 - DNA, 260 bp, Unknown
  Description of Unknown: RightRegion for integrase A1119 sequence
gggggacgcgtggtagcggaggagcgactcgaacccccgcgaggtggtcgatgcgtgtgacgcatttgtagcgccatcaatcgcgaaaaatcacatcggagcattgcactcgacggtcggcccatccaagaagtcgaccggtcccgacctcactcgtcgctgtcggcggagtcgacgttccatcggggatcgagaacgttgtcgatttcaaaattgatcccgtcgtcctggaagcgctcgagttcgggcagttcgcggag

SEQ ID NO: 38552 - DNA, 260 bp, Unknown
  Description of Unknown: RightRegion for integrase A1120 sequence
acacatcgagaagcctgcttatatacatacaacttcctgatacccgcaaaaaccaaataatttctcaataggtttccctgatggcgcggtattacccgcgctttattttttggttgttatggtgattgtagcataattttttaaaccccgaaaggagcggttacatggtattagacataatccttcctgatccagatccccctctccagccaggggaaggaggtggcaaaaatgagtaagaggtgccaggttaggtatgt

SEQ ID NO: 38553 - DNA, 260 bp, Unknown
  Description of Unknown: RightRegion for integrase A1121 sequence
aatggaatgaaggttgaagaagaatttattaaaaagagaggagtcaacggacttcagtaaaggagagatttttatggctagggtttcagtaataccagcaaggcaagtggctgttataaatggagttcagagggaagataaaaagagggtttgtgcttactgtagagtaagtacagatacagaggagcagcttaccagctatgaagcacaagttacttattatgaaagttatattaaaggtaaaccagagtacgaatttg

SEQ ID NO: 38554 - DNA, 260 bp, Unknown
  Description of Unknown: RightRegion for integrase A1122 sequence
tttaaagcgatagtatcttacagtatagatatagaaaataatgaaagtaaaaaaaaatagccactaacatggaattatatagtaaatcttcgtattctcgcagctctaccacagccccgttgattatcatttatcatttgagcttcatctattacacatacatcataaaaagttcctgtttgaagtttttcaatagttgaagaaacatgtgttccataaggaataatatcttcctcttctcctgtaagaagtgaacatga

SEQ ID NO: 38555 - DNA, 115 bp, Unknown
  Description of Unknown: RightRegion for integrase A1123 sequence
accttcaatggagataccaaagaaatttcaattgatttatggggatctaaaaaaaaatagatgctgacatggaagattatgagaaaatatcgcaattcaatatgtcatgcacatt

SEQ ID NO: 38556 - DNA, 260 bp, Unknown
  Description of Unknown: RightRegion for integrase A1124 sequence
ttgattgaatttatctgtattcaaaatggtaaagttgattttattagttataacctatgaaagactacttagataatttatatttagaatatttgaagttggaagagcgtgcttgggaagggataagtaaacagtgttattgtgacattgctggcttctctcctgaatgcgctagttgcccttcccatactttaatgagaagaaacataattaaacttcaagacgaccaatacttattttgtacatttgtaaaccctatt

SEQ ID NO: 38557 - DNA, 260 bp, Unknown
  Description of Unknown: RightRegion for integrase A1125 sequence
cttctccaagctgaagcagttccggcgtgtcgctacccgttacgagaagactgcccgtaactatcttgccatggtcaccctcgccgccaccatcctctggctcaggtaagggtccacagaacctagtgcgccggtcatccgtcaaggtgcgagcgcgctctctgccagggcgaggcgcatctcgccgataaagcggcggcccagcggtgagagcggcttgcggttcgaccagaaggtccaggcggtggcagggatggccg

SEQ ID NO: 38558 - DNA, 260 bp, Unknown
  Description of Unknown: RightRegion for integrase A1126 sequence
ggagataccgggaacctcacaataaagttctggggagataaaaaaaaattacttctttagaggtacagtacccttcattgcactttggtacagcgagcagaagccatttgtaccaaagtgcaatcgttactcaacaagtttacatcaacttgtatgaagaattatataaacatctttgtgaggaaacagttggcaaccgtatagaaaaaagtagattaattaaaaacttatcacaatatcaattaggaaaattgataggt

SEQ ID NO: 38559 - DNA, 260 bp, Unknown
  Description of Unknown: RightRegion for integrase A1127 sequence
tatcaggaattttgtgataattgggacacgctgaacagcaaaagtacgatcaatgcttagtttaatattttgatatttttcgcatagacttgaccgaaaggcaggtctattaaaaagctgtgaatttgcgttatgaataatcaaaagagctagagcatgcggctgttaaccgcagggtcgttggttcgagtccaacagggggagtaaaatccagggctctgaaatgacgtagatacgttgtttcagagcttttgctttta

SEQ ID NO: 38560 - DNA, 260 bp, Unknown
  Description of Unknown: RightRegion for integrase A1128 sequence
ggtaaagaacgtactcaaaaagtagaaatcaattataggtttctagcagtgtctcattgatacattctctgaaggaaatgggcgaagtatgcggatttggttggatcttatgttaaagaaagaactacaaaaggtaattgattggaatttagtagataaggaagactatttatctgctatggaacgtagtccaatcaacgatttagaaattagtcatttactttctcaagcactaacagaacaaatccatgatcgtcaac

SEQ ID NO: 38561 - DNA, 260 bp, Unknown
  Description of Unknown: RightRegion for integrase A1129 sequence
agtttggtggaggtggagtttgtttataagattggaagtgtagttaaggagatattgtaatttaagaaatagaggcaaagggtactactatggtaggtgtaaaatacttactatagtatatttttgctttgtagaataatatataaatttgatgaactaaattaatgttaaaataatgtaaaaaggtgtacaattaaattgtagaattatgtttgtttatggtggtggaaaatataatgaaaataattttgagtagaaaa

SEQ ID NO: 38562 - DNA, 260 bp, Unknown
  Description of Unknown: RightRegion for integrase A1130 sequence
agcgctgataaggtcgttgtgaagttttgtggtggcgagaaggtaacagttaaggtttaatattttatcatctttgcggtcatctctttttcaaaagtggaatatgcttggtttacgatgagcaaggaagttgaagttacaggaattaagatgacagcttcagttcctgagaatattcaagtttcacttggtgctggtacaaatggtacagcaggtttaacaggcgcttcgtttgtggaagcaaacgatggttcaactcg

SEQ ID NO: 38563 - DNA, 260 bp, Unknown
  Description of Unknown: RightRegion for integrase A1131 sequence
aatgaggttagagttgaggacaaaaaagttatcatcgatcaaaaattcaaaatgatttaagggactgtccgcaaagccgggcggtttttttgaatcataaaacaaaaaaccattcatagaatggttaatttgttattgacaatcccccaaatcaaacctattatattaactaaaggaaggttgtccataatttccttctaaaaaacattttagttaatacaaaaatccgggtctaaccggcattttaaattaactatgga

SEQ ID NO: 38564 - DNA, 260 bp, Unknown
  Description of Unknown: RightRegion for integrase A1132 sequence
aataagtataaatttagcagtaagtctagtatatggagtataagaaaaaagcataattagacatataacttatttggtatggttaagtagataaaaaatagcaataatttaatggaatattggcaaataaaagaaaaacgtgttaatataaatatactaaataaaatatgtgtaaacaatttggaaggtgaatagaattgagtagatatgatgtagtaagtataatgaaggatatgacagattctttaagaaaaaatatt

SEQ ID NO: 38565 - DNA, 260 bp, Unknown
  Description of Unknown: RightRegion for integrase A1133 sequence
tcggaaaataacgtgtcattaatttttaaggatggaactgaactggaattgaatatctagagcatacaaaacccgcagaagaactagttttttcttgcgggtttttttgtggtttattcaaatctccgagatactatttaaaagaaaaagtaaattccgtttagacatacaaacggaacttactttttcttttaaggtttttttgatattaactaaggtttattaatcttgcttgaagaaaggtaaacatttaacttgcg

SEQ ID NO: 38566 - DNA, 260 bp, Unknown
  Description of Unknown: RightRegion for integrase A1134 sequence
catagaaatcaaagtatcacgtttaagtttcatagtggtgtaacaattaaaacgagttaagtcgcttattaaaaaggcggcttttttgtatttttataattaagaaaatatgttataattttagttaagagaatatcttggaggagcacatcatggataactacgaagttgcgatcaatgggactactttagctgcacggattctaggtatagaaactcctaacgtgcagtttttttataaccaagatttaacgaaaaaa

SEQ ID NO: 38567 - DNA, 260 bp, Unknown
  Description of Unknown: RightRegion for integrase A1135 sequence
cgcaccatctcccgtgtccgcgccggcatctacgggcagtcgaagcgcccccagacgtgaaaagaccccagccacaaggctgaggtcttcacacgacgtaacaaacctaggcgtacccagggttgcgtggtataatcaaaggtgccgagatgtggccagtgtcccgatgacaccggccctctcggtcgtggggcctcccggctccacgttccctctacagcagaaggagaagcacatgggagtgcatccccaagacacac

SEQ ID NO: 38568 - DNA, 260 bp, Unknown; identical to SEQ ID NO: 38567
  Description of Unknown: RightRegion for integrase A1136 sequence

SEQ ID NO: 38569 - DNA, 260 bp, Unknown
  Description of Unknown: RightRegion for integrase A1137 sequence
gacgaggatacgatccggttcgtgttccgagttggtgaggtagtgagggttcagctgtaggaggttagagggaaatttttagcccgttcgtgcatgagcgccggacgggcttttctcatgcccagaaatcgtggcagcagcgaagtgatagtgctcggggagcgtttctgcaggtcagagctaacgcgctatacactcgctaacgcaagcgattttcttggcccccttggggcatactcgctaatgcaaacgcctactta

SEQ ID NO: 38570 - DNA, 260 bp, Unknown
  Description of Unknown: RightRegion for integrase A1138 sequence
gataccctcgacctgctgtatgaaattgccgcaccggtcgccattgcggaggcagcctgatgtccgccacacgcccacagcagatcgagctcatcccgatcgcgcggattaccgtccttaatccgcgcgcccgaaacaaacggcagcaccgggagatcgtgaacaatatcgagaccattggtctcaaacgtccgatcacggtgagccgccatgatggcccgagtggcccgcgctatgatctggtctgcggagagggccgc

SEQ ID NO: 38571 - DNA, 260 bp, Unknown
  Description of Unknown: RightRegion for integrase A1139 sequence
gacaccctcgacctgctgtacgaaatcgccgcgcccatcgccattgcggaggcagcctgatgtccgccacacgcccacagcagatcgagctcatcccgatctcgcggatcactgtccttaatccgcgcgcccgaaacaaacggcagcaccgggagatcgtgaacaatatcgagaccattggcctcaaacgtccgatcacggtgagccgccatgatggccctagtggtccgcgctatgatctggtctgcggagagggccgc

SEQ ID NO: 38572 - DNA, 260 bp, Unknown
  Description of Unknown: RightRegion for integrase A1140 sequence
cagttacgaaccgatttttcaaagcgtgatgtaaaaaaacaaatcagcttgattttgtaaaacagctatcacacattggtggctgttttttcgttattgatgtatcggtatttgggttgaactgtagatgaaaattcttttgctactcggtgattaggaaggagtggtataccactccttcctaatcaccgagtttgatactcttggaaaagagcttgtatcttagggataaagggattgtcgttgtttattattatgga

SEQ ID NO: 38573 - DNA, 260 bp, Unknown
  Description of Unknown: RightRegion for integrase A1141 sequence
attataatagatcaaaatgggaaaacagaatatattttaaaaataaatttagagcaataaaaagtaactcggaaatttgagtttctttttattgctttttaatatcacaaatatggacgtgctatgggttgtcatttagaaatatgctagtttcaaagaaagtatttttctcggcaaaaaggtgaaggagttatgccaagaaaaacgtttactcggtattaagttagtaatggtatacgtaaaaaagaatctattttcaa

SEQ ID NO: 38574 - DNA, 260 bp, Unknown
  Description of Unknown: RightRegion for integrase A1142 sequence
ctcaacccccttatccggctggcagagcgagcctctgtcgggagcgcggcctggaattgaaacgtttaagcaaagacgccgcttaccgtgcgttggagaacagcggcaacagacatgcgaggagtatcgctgctggtcaactagggtccaaggcaaagctttttgcgcccgaacttttggcgacctacgacgcggaatgcaaacgcatgcgcgatttcataacaggagcagaagagtctgaacggtgcctggaccgtatg

SEQ ID NO: 38575 - DNA, 260 bp, Unknown
  Description of Unknown: RightRegion for integrase A1143 sequence
gagacgctcgactacctctatggaatggccgcccgggcgcggctgcgggtggcggcgtgagcgcagatcgccagcaggagcttcgacagatcccgatcgatcgcatcgaggtgctcaacccgcgcgagcgcaacagccgggcctttggggagatcgtcggcaacatcaagaccatcgggttgaagaagccgatcgtcgtgacaccgcggcgtgggcctaatggcgacgaacgctacctgctcgtgtgcggcgaggggcgc

SEQ ID NO: 38576 - DNA, 260 bp, Unknown
  Description of Unknown: RightRegion for integrase A1144 sequence
gacacacttgactacctttatcgcatggctgaacgcgcgcgccttcggagggtagcatgaatacatgcgcaaacccactcgtagtccgaaccgtcccgatcgagcgcatcgagataatcaatcaccgtgaccgtaacagtcggatatttgaggagatcgtcgggaacattcaggcgattgggctcaagaaaccgatagtagttacttcgcgaatagcatcggacggcactgaacgcttcatcctcgtttgtggggaggga

SEQ ID NO: 38577 - DNA, 260 bp, Unknown
  Description of Unknown: RightRegion for integrase A1145 sequence
acagtctatgaaggccacttcgtcatagccttcaaatctggcatcgaaatggaaatatgaaaaccagaagtaaatagcccatgactctacagtagagttgtgggttttcttttgcttgctgattataataatattttaataactattgtgtttatcaaccaaatggtttataatattcttagcgtaaacttggaggtgctgtatgactacggcagaaatgattaaagaactgtgtgagcaaatgaatataagtgtttccg

SEQ ID NO: 38578 - DNA, 260 bp, Unknown
  Description of Unknown: RightRegion for integrase A1146 sequence
gcttcgcttgatcctgtagttgagatggcgagacgagaaccaatgccggcaaatatatgagaactacgaaagcccggcttcgcgacttcgtcacaaacaatcggcatgccattcggctgacggtagattcgcgggcgccgatgaacccgctgcgtgtctccggtttgttgaagacctacaggcgccaagtcgacaatatgcaggaattcatcagggaagccgacgcggtgaaacaccagatggaaagcgtcgtcgatgcc

SEQ ID NO: 38579 - DNA, 260 bp, Unknown
  Description of Unknown: RightRegion for integrase A1147 sequence
cccgtttcatccttcatcagcagccttgcctacctgtgtggagacacgctgattctctgaccctaccccattcccgcaagcgggtttactgcatttcactttttaaaaccgatccgttctatcggtctacacagtagcgggactgactgtccggtaaacctacggtgttccagcaaacacgcccagtgtctgcaagctgccgcattatatcgctgcctctgcaggctaaatgcctgtctgacatccaggtttgccattat

SEQ ID NO: 38580 - DNA, 260 bp, Unknown
  Description of Unknown: RightRegion for integrase A1148 sequence
gcttcgcttgatcctgtggttgaggtggcgagacgagaaccaatgccggcaaatatatgagaactacgaaagccgggcttcgcgacttcgtcacaaacaatcggcatgccattcggctgacggtagattcgcgggcgccgatgaacccgctgcgtgtctccggtttgttgaagacctacaggcgccaagtcgacaatatgcaggaattcatcagggaagccgacgcggtgaaacaccagatggaaagcgtcgtcgatgcc

SEQ ID NO: 38581 - DNA, 260 bp, Unknown
  Description of Unknown: RightRegion for integrase A1149 sequence
gcagatctgtctcgattcattcggcttacagaacgtgtacccatcaggagggcggcatgactgacggattacccgaaatcaaatccatcccgatcgacgcaatcaatgtcctcaatccacgggttcgtaataaaaagattttcaatgagctcgtaaccagcattgcccatttgggactgaagaggccaatcacggtcagcgtacgggatgacaattctgtatacgatctggtttgtggccaagggagattggaggcattc

SEQ ID NO: 38582 - DNA, 260 bp, Unknown; identical to SEQ ID NO: 37325
  Description of Unknown: RightRegion for integrase A1150 sequence

SEQ ID NO: 38583 - DNA, 260 bp, Unknown
  Description of Unknown: RightRegion for integrase A1151 sequence
agatacaccgacgtgcctgccgttgcgactgcaatcgccgacatcgccttaaacttgtgaccgtagtcttcagttggcccttggcattcgtcctgtgctatcaagtacgccaccgttccttgaacgagcgcgacgtcagtcaacgccgatcacgcgtttgacgatgacagggttatgttagctgtattggccgctggcggcgccagttgcagatgatcgtggcgcttcgcgagttgtccggtggcgcaactgtccagcag

SEQ ID NO: 38584 - DNA, 260 bp, Unknown
  Description of Unknown: RightRegion for integrase A1152 sequence
agaaaaacaacttggaacagaagagatgaatttgtcatagaattatacaccaagatttaacttaatatactattaaaattaataacccccatcatcgttttgatcaaaagtttataaccttctctttatttagatataaatttaccttaatagtaatttagtacttcaaactcttagctcatagggaaaatattttatattcaaaaaaagaaccaacctgtataagttggttctttttcgctacttattactatacaaac

SEQ ID NO: 38585 - DNA, 60 bp, Unknown
  Description of Unknown: RightRegion for integrase A1153 sequence
gatcatgacgagtactttaactttgtacccggtactgagaagaacaccttcagattgtac

SEQ ID NO: 38586 - DNA, 260 bp, Unknown
  Description of Unknown: RightRegion for integrase A1154 sequence
actttcaggctgcccagcggacttgaatttacagaaaggttggataggaatggcaattaaaaagaccccctacggctacatttgggcagagggcaggatcgctgttgatattggtgaagccgagataatccgccgtatctttgacgaaaaggcaaacggcttatctggcagtaagatcggtgcagcactctatgatgaacagataccctatttctcggaggataagaaaaaagctatcgacaaggtgtacggcattctcc

SEQ ID NO: 38587 - DNA, 260 bp, Unknown
  Description of Unknown: RightRegion for integrase A1155 sequence
gtttctttggaggtttttcgtgaacccggaaacgcggcaaataattaccgtcccgattgacagcattacgattctcaatccgcgagctcgaagcaaggtcaagcaccaggaaatcatagacagcattgcggctgtcggattgaagcgacccattacggtcagcttgcgttcaaccgacgacgggtacagcacgtacaacctcgtgtgtgggcagggacgtattgaggcgctccggctgcttggttatttggaggcgccag

SEQ ID NO: 38588 - DNA, 260 bp, Unknown
  Description of Unknown: RightRegion for integrase A1156 sequence
attgttcatcagattactattcgcaacgcagaagttgaagaagtcattttgaaaatttaagtctgtagctaacttggctctatgaatacgcaagaaagttttaatttaaacaagctcagatgtgaagtagcaatgcaacaagcgttgcagtcatggcaaccaaaaccacaagtttctggcatggaatgtccaaaatgcaattctcatctccttgggaaacatggtcgagaaccagatggtgtacaacggtatatctgtaa

SEQ ID NO: 38589 - DNA, 260 bp, Unknown
  Description of Unknown: RightRegion for integrase A1157 sequence
cttggtataggtgaggcgtacagaacccgtgtccacaaattatacataaccaaatattaacataaaaataataaatcctcatataaatctgtaaaacatagttccattataatcaatgcaaattttcacataaataatttttttcaactttactccagtctattacattccatatatttttaacataatcagctctcaaattctgatactttaaataatatgcatgttcccaaacatcaattgttaatattggcttcatc

SEQ ID NO: 38590 - DNA, 260 bp, Unknown
  Description of Unknown: RightRegion for integrase A1158 sequence
gacccgggtcagctggtcagcgcgctggcctatacggacgatgaaacgcttgtgctttaagccgggtggcgaagacatcccatatcagagagcgtaaaagccggctctgaagagcgggcgcaccttatacatgcgcccgctttttcagaggaagtgaatatgctttttaccgtggaagggcgaaacgcccacgcgcgcctccacctgaaagacgtccatcagcagcgattcggtcagcacctcgtccggcgtgccgctgg

SEQ ID NO: 38591 - DNA, 260 bp, Unknown
  Description of Unknown: RightRegion for integrase A1159 sequence
tccgcccagcaggcgataagtactcttaaatatatggttgatggtgaggtttatttttgagtaataatcactttttcaaccgtgctatggtatgaaagtaaagtaactaatatgatattaactatcttgaacgaagcgccctgagctatagttttactataggcactgtcactggatgttggcattcttgctctagtagctcaacaatacccaatcacaaaacaattcactgataacaaactttgtgcacgtgcttggtt

SEQ ID NO: 38592 - DNA, 260 bp, Unknown
  Description of Unknown: RightRegion for integrase A1160 sequence
aaaaaaattgttgttctcgatagtcaagttactactatagaattaaaggttagtggctagtaatttgggctcttctacttctcgtctgataaattattcattgaaaaaaggcagacggcagaaagcagaagggaaatataaaatcattgggttaatattttttttcatcccttcttcctagaataataagagatgcttaaaaccttacttcttcatctcaaaaaacaataaaaatcttataaatactaaattttaaatac

SEQ ID NO: 38593 - DNA, 260 bp, Unknown
  Description of Unknown: RightRegion for integrase A1161 sequence
gtggacgaaacgctgacattccgcctgcaatgcggtcttgaatttacagaggtggtgtaattatggcagtaagaaaaacgccgtatgggtacataatagcgaacggcagaatcgcagtcgatgctgaggaagcagaggtcatcaagcgtatcttttccgatcgtatcagcggtctttcgggcgtgaagataggcgcggcgctctttgccgagcatatcgagccattcaccgaaagcgagaaaaaagcggctgacaggatt

SEQ ID NO: 38594 - DNA, 260 bp, Unknown
  Description of Unknown: RightRegion for integrase A1162 sequence
gactgcgggcgctacgaccgcctgcgcgcggtgcgggagggatgccatggaacggcatgagctgatggcgctgatggccgagctcagcttggccggcatgcgtgccgcctacgacgaggtgatgagcgacgggctgaagcggcagcgcaccgtccagcagatcctgggcgatctgctggcggcggagcgggcggagaagcaggcgcgctcgatccgttaccagctcggcgccgccaagctgcccctggccaagacgctgg

SEQ ID NO: 38595 - DNA, 260 bp, Unknown
  Description of Unknown: RightRegion for integrase A1163 sequence
ttgatgattaccaccgttgccgccacaagcgacagcttgaacattacatggaaaatctgacgggcggtaatcctcccgtcagaccgttaccccgtgtagtcccttgtaaactgtactttactaatatcaaaactttctctatccaatgaatttattttaaaactaaaaacaagttccgtaaatgaaatttctttattttcaaaatttaatgcgtaaaaaatattttgattaaattcaaattcactataagaaaagtcaaa

SEQ ID NO: 38596 - DNA, 260 bp, Unknown
  Description of Unknown: RightRegion for integrase A1164 sequence
gggcggcgagcaccgagcaaggagtggtggaaggatatcgacttgcgctggaaggactgaatattaggttaggtcgtcctaacattacataggtggaccattgttagtttcgcgcccttcctatctggctgcacattattccgaggacgctcccggccgcccggccgtgctttcctgaatcattttagaacgttggcgaactgcggccgggtggaggatgaccagcgccgggggccggtgccggcggtcggccaaccgta

SEQ ID NO: 38597 - DNA, 260 bp, Unknown
  Description of Unknown: RightRegion for integrase A1165 sequence
atttttaaacatccatttttacattatccagaggtgcatacatgtgaagacaattcgtgatgttttagaaaaaggaaaaaaaggagccttttatgcgagggtttcgtctgatcgtcaaacaatcgatgcgcaaaggcatcatgtatatgaatttataaaaaactatgaatgtgaaattgtgaaagaatatgtagatcctggagaatcggcatttaaaaagaagttaatcaagcgtccccaaatcatggcgttattacgag

SEQ ID NO: 38598 - DNA, 260 bp, Unknown
  Description of Unknown: RightRegion for integrase A1166 sequence
ttgaactttttcttcgacatggcccggcgcgtttccgtttccgaggtgacaccatggtgagcgatatcgaaacccacgccgaggttcagattatccccattgcggccatcaccgtggaaaatccgcgagaacgatctgaaaagacctttcgtgcgctggtggacagtatcggcaaggtcgggctgaagaagccgatcaccgtcgcgcaggatgacacggcgtcaggggatgcctatcggctggtctgcggtcaggggcgg

SEQ ID NO: 38599 - DNA, 260 bp, Unknown
  Description of Unknown: RightRegion for integrase A1167 sequence
gtcttcttaaatatgccacatcgacctaagtggctccccggacaggacttgaacctgtgacctaatgattaacagtcatccgctctaccgactgagctaccggggaatagatggcgaatcttaaatggattcgacctgtgggtcaagagaatatcaagatattatagatcatttttcaatgaattgttgcaacctgttcatcgcatcctctaaaactcccatgcttgttgcaaaagacaaacggatgcatccttcagtac

SEQ ID NO: 38600 - DNA, 260 bp, Unknown
  Description of Unknown: RightRegion for integrase A1168 sequence
gcagatctgtctcgattcattcggcttacagaacgtgtacccattaggagggcggcatgactgacggattacctgaaatcaaatccatcccgatcgacgcaatcaatgtcctcaatccacgggttcgtaataaaaagattttcaacgaactcgttaccagcattgcccatttaggactgaagaggccaatcacggtcagcgttcgggatgacaattctgaatacgacttggtttgtggccaagggagattagaggcgttc

SEQ ID NO: 38601 - DNA, 260 bp, Unknown
  Description of Unknown: RightRegion for integrase A1169 sequence
gatgacctcgctattctctatcagattgctgcgcccgttaacctgtcggaggctgcgtaatgtctgctcttcattcaagtcatatagaaatgatcccgatttcacgcatctcagtgctcaatccgcgcgcgcgcaacaaacgacagcatcgggatatcgtgaacaatatcgaagccgttggtctcaagcgcccgatcactgtcagccgccacaatggcccaggcgggccacggtacgatctggtttgcggggaaggccgt

SEQ ID NO: 38602 - DNA, 260 bp, Unknown
  Description of Unknown: RightRegion for integrase A1170 sequence
gacgacctcgctattctctatcagatcgctgcacccgttaacctgtcggaggccgcgtgatggctgctcttcattcaaatcatatcgaaatgatcccgatttcacgcatctcggtgcttaacccccgcgcgcgcaacaaaaggcagcatcgggatatcgtggccaatatcgaagccatcggtctcaaacgcccgatcactgtcagccgccacaatggcccaagcggaccacggtatgatctggtttgcggggagggccgc

SEQ ID NO: 38603 - DNA, 260 bp, Unknown
  Description of Unknown: RightRegion for integrase A1171 sequence
ctggtcaagcgcatcaccgtgcagacggacggcagtgtcgacatcgagtgggtggtgtagaggtacggttcgcgccgcttcagctgccgtgtactcggtctcgtaaggctgggcgagagcagattgagtttcaattgcgctgctcgtgtgaattcctgtgagttcgagggcgtggggttctcgggcgaggacctcgcggtgatgttcagccggaacccggaggcgacccgtgcggagatcgcgcgcaagaaggaagcgcg

SEQ ID NO: 38604 - DNA, 260 bp, Unknown
  Description of Unknown: RightRegion for integrase A1172 sequence
gattcgttggactacttctatggcatggcggagcgattccgcctcaggagagcggcatgacggcaagcgcacagccagaacttcggatgattcccatttctcgcattgaggtgctgaaccctcgggatcgcaaccaggaggtcttcaatgagatcgtcgagaacatacagaacatcggcttgaaaaaacccatcacggtgaccccaaggatcggggacgacggcgctgagaaatacctgctcgtttgcggcgaaggccgc

SEQ ID NO: 38605 - DNA, 260 bp, Unknown
  Description of Unknown: RightRegion for integrase A1173 sequence
gcgacgctcgaggcgctctacgaactgatgcgtcgcattcccctggcggaggtggcgtaatggcaagggaacgaaaggaagacgttccccaccatgtcgggggcgtacaggagatccggtcgatcccggtcgaccatgtccgcatcgtcaatccgcgggcaagaagcccgaagatctttgcaggcatcgtcgagagcatcgcgacggttggtctgaagcgaccaatcaccgtcacggaagcccggcgcgacgatggcggg

SEQ ID NO: 38606 - DNA, 260 bp, Unknown
  Description of Unknown: RightRegion for integrase A1174 sequence
gagccgattgccacgggggtggagcttattcaggctttgcgagtcaggctggcgcaatagcctagtcggggtcgccttggcacatcaagctcctttaaatgaaggcgatttgggcggcgccggcgaccgtccggtcctggccgaggttgtgtggaaactccgttgatggtcgcctatattgagccaacccgtctgagccaggtggctgcccatgaagcgattcatcgaaggcgaggaccgacagcaggtcactctgctgc

SEQ ID NO: 38607 - DNA, 260 bp, Unknown
  Description of Unknown: RightRegion for integrase A1175 sequence
ctgccagagaggcaaaagcccgccggaccccgccaagtctacaaagtcaaaaaacaataataacaacaagttacgcgaatttttaaattaacaaaatttatatttgtagcaaaaaaaacaaaaaaacgctgcaaacccgaagggatgcagcgtttgtcattttttagctatgcacctgctctaccagctgagctagggtggcaattagtaattgatttaacattttgtttttacaagtgattttctctgttttggtctac

SEQ ID NO: 38608 - DNA, 260 bp, Unknown
  Description of Unknown: RightRegion for integrase A1176 sequence
atctatgcgaagaaggtctccgccctgaccaaggcgctcaatcgcaaggaagagcgctaggaagcggcggagacattgcgcggcctgatcgagaagatttcgctcacaccggggccggaacgcggcgagatttacgcaacgctgcacggcgaactgggcacgatcctcaattggacggagcgtcaagccattggaaaggctacaaaaacaaacactcccggaggtgatctcacgggagtgtcgttatcagtggttgcggg

SEQ ID NO: 38609 - DNA, 260 bp, Unknown
  Description of Unknown: RightRegion for integrase A1177 sequence
cttttagcaagggttgtgattgggaagggtgaggtgactagcgttctgttgaaggtttgagggaagttttgtttaagtctatctacaattgattgaggtttttatttatgcccaagttaactttagagcgattccatgaggcggcttcaagatttgaaaaggctgaagccgaagttcaacgagcttggaaacaaggttgtcattgccctgcaccgggcgaacgggttgagtgttggacttgcccgtactacaagaattta

SEQ ID NO: 38610 - DNA, 260 bp, Unknown
  Description of Unknown: RightRegion for integrase A1178 sequence
aactgcgaaattgtttttaaacacccattcttacgtactcaagaggtgttaacatcatgaagctttctcatatattacaaccaaatatgaaggctgctttttatggccgtcattctacggataaacaagacatggatatgcaattgaattcggttatggaagtgattcgcaaatatgattgcattcatactcattcttttcttgataaggctgtttctgctcgtaaaaataaaattacaagtaggaaagaacttgaaaat

SEQ ID NO: 38611 - DNA, 260 bp, Unknown
  Description of Unknown: RightRegion for integrase A1179 sequence
ggcactcccggcgcccgcagcctcgacatcaaccgcgtacggcctcactggggggtatgagcgagcaacgacatggatgttgcgctctgctctgaggctgatcgagacatccggacatgctcgtgaccaccgtgaattcggggaaagctcctcgccgtctgccggacgtctgcaatccggtcggaactacgcggttgtcggcgcggcgcgatagcgtcctcattaccgacgataggatcacggcattaggtggtactgag

SEQ ID NO: 38612 - DNA, 260 bp, Unknown
  Description of Unknown: RightRegion for integrase A1180 sequence
tcagtacgactacccccccctcttcttttttttgaagggggtagttatctaactctttaattatctaagagttatctacggcaccgcattatgggacctaccgaccgcattatgggacctaccgaatcgcttttaccgcattatgggacctaccacaccgcattatgggacctaccgatttttcggattacctccagtgctggattttccagggagcgggttttcaaaggacaccatcccctcttttttctcgtatcgga

SEQ ID NO: 38613 - DNA, 260 bp, Unknown
  Description of Unknown: RightRegion for integrase A1181 sequence
ttctcacagctccaggagcggcaccaagcggcggtcgaagtggccgaatgcgagctctgactcctcgtcagccgtctggaagacttctcagccaaggtaaaagcagggcttgcccgccttgataggatcggcatgcggcagatcattcgcaccgtggttcgccgggtcgaaatcgacgacgcgcacgtcgagatcgtcttcagggttcccccactcgagggcccaactggcccaaaatcaccaagccaggcgaccagttc

SEQ ID NO: 38614 - DNA, 260 bp, Unknown
  Description of Unknown: RightRegion for integrase A1182 sequence
tacaccagggaggcggggaagattgacccgaaccgcgtcgacatcacgcctatcggctagcggcgctagtggccgtcgcgtaggaaccgctcggcggcgtgcaccgtcgaccgcacgctgaccgcttcttcgcggtcgcgggcgatcgcgtagtcggtgcacgccaggatgaactgttcaaggtgtctgacgatggcggcgataccgacggtgccccagccagtcagcatgacgatgagcgccagcgggagcatgacggg

SEQ ID NO: 38615 - DNA, 260 bp, Unknown
  Description of Unknown: RightRegion for integrase A1183 sequence
cgtgcgggtaagaatccaattccacctgtaatcaaagttatggatttcaaattaaaataaacacaacctaactgcatttatttaatgtagttaggttgtgtttaattgaccaaacactatataactacaataaaagagcacagcgtgtatataaagtgcgaccaacactctatataccgtccgcctaatccatctaggcaaacacttgctgtactcttacgaactattttacagtacgtaagggctccttagcaacagtt

SEQ ID NO: 38616 - DNA, 260 bp, Unknown
  Description of Unknown: RightRegion for integrase A1184 sequence
gtgatgtacagagagaaaggaaggggtaagaaaatctctcttgattacacgttgaagtaaaccgaacctgtttaaaagttaaggttgggcagctaacccaaacagacggaacgtttctcgtttcccgtaaaaaaatcgacaacttctcatgggagatgctgaaaggaagcactttcctcggccagcgaaaaggcggcatgccacaaatggtcggtgaatttgtgttgaaaaaacacggcatcgatccgcacaaagactta

SEQ ID NO: 38617 - DNA, 260 bp, Unknown
  Description of Unknown: RightRegion for integrase A1185 sequence
gtaatatacagagaaaaagggaagttcaagaagattacactggactatactttaaaatgatcccaacctgtgtaagagttaacttcgcgcatgcaaacttaacttttatacaggttagggacgatgtattatttctaacgataataatctaaacaaagtaaaacatcaaggcggatcactccgccttttcgttttttggctcacccgcgacccgaatcattccgtcgcgagtgacaagccaagtgcccgcactttttctc

SEQ ID NO: 38618 - DNA, 260 bp, Unknown
  Description of Unknown: RightRegion for integrase A1186 sequence
accgtgaagggcgtgaagcgcacgttcaagccggagtgcgtcgacatcgagtggctttgatcgccaattctggcatgactcaacagattccgagccccacgccgaacaggcactttgtcgcacactctggcacggagcagaacagtccgatacagttcttcttgtcggtaacgagccgacaccatcggataccgtgcggcacaagctgagcgggacgaacgagagtctgcgggccacgcgccccggctaagcggtggtct

SEQ ID NO: 38619 - DNA, 260 bp, Unknown
  Description of Unknown: RightRegion for integrase A1187 sequence
gtattcgacccgttgatggtagagatcctgccgcgcaatggatttgtctgccggccctagctcatcgccaccgggcccacacaaagggcacaagggcgcgcagaaaatccagatccggccccggcgttgcgtcggcgaaggcttgctcgaagtactcctcggcgaccagcagtattccttcggcgtactcgcgggtaaacgcaatgctgtcgtaagtatccatcagcgcgcgaacaccgcgaaccatctcgggtgaacgc

SEQ ID NO: 38620 - DNA, 260 bp, Unknown
  Description of Unknown: RightRegion for integrase A1188 sequence
gcacagcgccgatttcctgaaggtggacccggacaaccggttggtcgccgatgcgcttgaggccgactggaacgctcgcttgcgctcgctggccgaggcacagcaggcatacgaaaaggcgagcgtggccgacagcaatgtcgtcaccgatgccgagcgcgttgaattactggccctggcaacggacttcccccggttgtggcgtaatccgcgcacgcagatgaaagagaagaagcgcatgttgcggctgttgatcgagg

SEQ ID NO: 38621 - DNA, 260 bp, Unknown
  Description of Unknown: RightRegion for integrase A1189 sequence
gaacaactggcacaagaaataaccccggaaactttgaaaaagaaggtggtcaatggataatcaatcaacacctatgtctcatataattgaaagtagcgacggctccctctcaataaagataccgttaacacctaaagtacgcagtggccgtaagattattaccctccctggcagtacagatagcgactaccgcccctgggatagccagcccacgccacttcaattagcgctagcgagggcttatgagtgggagcaaaaac

SEQ ID NO: 38622 - DNA, 260 bp, Unknown
  Description of Unknown: RightRegion for integrase A1190 sequence
atgcgccagattgaatacttagaagggaggaagggagaatgcgtacggcacgtgcagtaagaatgatacctgcaacggcaaaacttcatgagcctgttgcaaataacgccatagggcagaaaagggtcgcggcctatgcgagggtttcaacagacaacgacgagcaactctcaagctatgaggcacaggtagattactatacaagacacatcaagtcgaatccagagtgggattttgttgaggtttatgcagacgagggc

SEQ ID NO: 38623 - DNA, 260 bp, Unknown
  Description of Unknown: RightRegion for integrase A1191 sequence
aaagaacaagcacgattaagagcactagaacagcatcatggaggtggagaaaatgcctaaagtcacagtcataccatcaacaattaatcctattacacaaatgcctatccatgcgaatcatgttaagaaagtagccgcatacgctagggtttcaacaaacagcgatgaacagtacacgagttacgaggctcaggtgaatttctataaaaaatacattcaagaaaaacctgactgggagtataccgaagtttacgctgatg

SEQ ID NO: 38624 - DNA, 260 bp, Unknown
  Description of Unknown: RightRegion for integrase A1192 sequence
agagaagcagaagcgttaagtagaaaagcagaggatagcgataaaaatgatgatagctgaactgttgctactgcaactggctctcttttgtgcataaaaattattcagaacatcatttaaaatactccagtaatttcccggcaaccctttccttcatttccttcggccagtcaggatcgaggaatgtttcatttttgataactttagatgagtccacagtttctttgattatcccgaaaatcgcatcaattagaaagcca

SEQ ID NO: 38625 - DNA, 260 bp, Unknown
  Description of Unknown: RightRegion for integrase A1193 sequence
gtgcgccgctggcgtgtcaccgacgccgggccggtatgcccggatcaccccgacagctagtcgagtccgggttcgtcggtgagcccaccgaagacccatgccgggaaccctcgcttgagcgcataacgtcgagcgacctgtgaccagtcccgtgccgtaccggcctgcaccggcgcggcgggccaccagcggggcggattcagcagatcgagccgcgacggcgcgcagcgtcgcactgggggatctccgggcggcaccgg

SEQ ID NO: 38626 - DNA, 260 bp, Unknown; identical to SEQ ID NO: 38625
  Description of Unknown: RightRegion for integrase A1194 sequence

SEQ ID NO: 38627 - DNA, 260 bp, Unknown
  Description of Unknown: RightRegion for integrase A1195 sequence
cacctcgcggatggaactatgacgccggtgggcttaaccagtgaggggaggttggcatgagtcgcacggtcactgcgatacccgcaacaaagaaacccggaactgtcacaaccccgtccggggtaccggcacgcagaaaggtcgccgcctacgcgcgagtctctaccgagatggaagaacaaacctcatcatatgaggcgcaaatcgactactacaccacctacattcgctcccgtaatgattggcagttcgcgggcatg

SEQ ID NO: 38628 - DNA, 260 bp, Unknown
  Description of Unknown: RightRegion for integrase A1196 sequence
ggccaaactgccgcgacagatttggttcatctggcgagccaagcgctgcaaacgttttgagcagcggcgtttctacaacgagacagcgactaccgttgacggagcccgtgccgtgtcttgaagagcacccggccgggtcaggcgggggcgcttccggcctgccattgcgtccagggcacactccagtcaccgttgttctgcaacgacagtggcgggcccccggtgttgcggacctcgacgatgtcgccgggttgggaaaa

SEQ ID NO: 38629 - DNA, 260 bp, Unknown; identical to SEQ ID NO: 38628
  Description of Unknown: RightRegion for integrase A1197 sequence

SEQ ID NO: 38630 - DNA, 260 bp, Unknown
  Description of Unknown: RightRegion for integrase A1198 sequence
atcgcccagggtctcggcgtgggcagggcaacgctctaccgggctctatctgttgattagaacaagtaaacgcgagagtcgctgtacaccggagaaatatcgtttccccatccagtcacaatgttctttgacagcgctggttgtttagaagctgatccgcagaatttaaaatcaaaagaatatgccatgcccacagtgtcggaacatcacgtggcggtcagggtacacacgatcggcaggtgacgtaataaggctatttt

SEQ ID NO: 38631 - DNA, 260 bp, Unknown; identical to SEQ ID NO: 38630
  Description of Unknown: RightRegion for integrase A1199 sequence

SEQ ID NO: 38632 - DNA, 260 bp, Unknown; identical to SEQ ID NO: 37763
  Description of Unknown: RightRegion for integrase A1200 sequence

SEQ ID NO: 38633 - DNA, 260 bp, Unknown
  Description of Unknown: RightRegion for integrase A1201 sequence
cagacgaaagaacgggtatccgatatgaacttatcggggactattactacccctgcttaaccgcagaagaaaaacctttgctttcaaggtacggaagaatgcgagagcgatatttgaaagaacacaagcgagttttatattacactctgatgacaagtggaaagttatatgaacaccttgccgagattgacacttcggcttgtgatatggctgaatatctcataaaggaaatggcaagaaagcaaggcgttaccgagcaa

SEQ ID NO: 38634 - DNA, 72 bp, Unknown
  Description of Unknown: RightRegion for integrase A1202 sequence
ggtaaagaacgtactcaaaaagtagaaatcaattataggtttctagcagtgtctcattgatacattctctga

SEQ ID NO: 38635 - DNA, 260 bp, Unknown; identical to SEQ ID NO: 37479
  Description of Unknown: RightRegion for integrase A1203 sequence

SEQ ID NO: 38636 - DNA, 161 bp, Unknown; identical to SEQ ID NO: 25649
  Description of Unknown: RightRegion for integrase A1204 sequence

SEQ ID NO: 38637 - DNA, 260 bp, Unknown; identical to SEQ ID NO: 37479
  Description of Unknown: RightRegion for integrase A1205 sequence

SEQ ID NO: 38638 - DNA, 260 bp, Unknown; identical to SEQ ID NO: 38633
  Description of Unknown: RightRegion for integrase A1206 sequence

SEQ ID NO: 38639 - DNA, 260 bp, Unknown; identical to SEQ ID NO: 24864
  Description of Unknown: RightRegion for integrase A1207 sequence

SEQ ID NO: 38640 - DNA, 260 bp, Unknown; identical to SEQ ID NO: 25656
  Description of Unknown: RightRegion for integrase A1208 sequence

SEQ ID NO: 38641 - DNA, 260 bp, Unknown; identical to SEQ ID NO: 37543
  Description of Unknown: RightRegion for integrase A1209 sequence

SEQ ID NO: 38642 - DNA, 260 bp, Unknown
  Description of Unknown: RightRegion for integrase A1210 sequence
tttatcgtgaaagaagttaccattgtggattctgacaccatatatattgaaacgtattaaagaggggtgtatgcaccccccttttgtaattacaatctcattttcaatacacctcgctgcatacgtcgccacctttgtcccttttccagcggaatagctttcaattcctttaataagcccgatcgttccgatggagattaagtcctctgcatcctcacctgtattttcgaactttttcacaatatgggcgaccaagcgaa

SEQ ID NO: 38643 - DNA, 260 bp, Unknown; identical to SEQ ID NO: 37455
  Description of Unknown: RightRegion for integrase A1211 sequence

SEQ ID NO: 38644 - DNA, 260 bp, Unknown; identical to SEQ ID NO: 25639
  Description of Unknown: RightRegion for integrase A1212 sequence

SEQ ID NO: 38645 - DNA, 260 bp, Unknown
  Description of Unknown: RightRegion for integrase A1213 sequence
tatgcgggtgaaaagacgagacgagttgagggatcggcctacgaatacgaaagcgattgacattccgaacgaatgaaacaatatccgactcagcgatttggaaaggaattctccatggctaagactaccggactgccgacccttgaagacctcgttgacgttccgcgcggtgatttgctcaaactgagggcgaatgtcgaagaagctcttagggccaatgaagctcgcgaaaagcaagctgctaaggacaagatcaagga

SEQ ID NO: 38646 - DNA, 260 bp, Unknown; identical to SEQ ID NO: 37479
  Description of Unknown: RightRegion for integrase A1214 sequence

SEQ ID NO: 38647 - DNA, 260 bp, Unknown; identical to SEQ ID NO: 24488
  Description of Unknown: RightRegion for integrase A1215 sequence

SEQ ID NO: 38648 - DNA, 260 bp, Unknown; identical to SEQ ID NO: 37649
  Description of Unknown: RightRegion for integrase A1216 sequence

SEQ ID NO: 38649 - DNA, 260 bp, Unknown; identical to SEQ ID NO: 25636
  Description of Unknown: RightRegion for integrase A1217 sequence

SEQ ID NO: 38650 - DNA, 260 bp, Unknown
  Description of Unknown: RightRegion for integrase A1218 sequence
ctgtcgtacgtcggcgagcccggcttcaagccggtcggcggcaaccgggccaagcagtagctacgccagcgccatggggagcgtcggcgccgcgagcagcgggtcgggggccggcgcgggagggaacgggcggcgcttgaaccagatctgaatccagagcccgtcgccgccgagacgtagcaacaggtcgttcatggcgtcccgcagctggctggtgcagtagcggtcgctgaccaggtgtatgcaccagccgtcgtcct

SEQ ID NO: 38651 - DNA, 260 bp, Unknown; identical to SEQ ID NO: 24488
  Description of Unknown: RightRegion for integrase A1219 sequence

SEQ ID NO: 38652 - DNA, 260 bp, Unknown; identical to SEQ ID NO: 24868
  Description of Unknown: RightRegion for integrase A1220 sequence

SEQ ID NO: 38653 - DNA, 260 bp, Unknown
  Description of Unknown: RightRegion for integrase A1221 sequence
aaatcactaattaataaaatttatatcgacggtgaacaagttactattgaatggctctagtagcttgtttatttagattgtttagtatctcgttatctctcgttggacgtaaagagggaacaaagcatctaataggtgtcactcataagccgcctattattattgaccctgttacttctacctatgtattccctactgtcgcgccaagttcaacagattgtatttggatttttccacagcatattaaggattatcatgca

SEQ ID NO: 38654 - DNA, 260 bp, Unknown
  Description of Unknown: RightRegion for integrase A1222 sequence
aaatcactaattaataaaatttatattgacggtgaacaagttactattgaatggctctagtagcttgtttatttagattgtttagttcctcgttttctctcgttggacggaaacgaatcgagaaactaaaattataaataaaaagtaacctgtttttctatagattgctttttatcgcatgcctctcgcctgtcccctcagttcagtaatttcctgcatttgcctgtttccagtcggtagatattccacaaaacagcagg

SEQ ID NO: 38655 - DNA, 260 bp, Unknown; identical to SEQ ID NO: 24864
  Description of Unknown: RightRegion for integrase A1223 sequence

SEQ ID NO: 38656 - DNA, 89 bp, Unknown; identical to SEQ ID NO: 24761
  Description of Unknown: RightRegion for integrase A1224 sequence

SEQ ID NO: 38657 - DNA, 260 bp, Unknown; identical to SEQ ID NO: 25639
  Description of Unknown: RightRegion for integrase A1225 sequence

SEQ ID NO: 38658 - DNA, 260 bp, Unknown; identical to SEQ ID NO: 37846
  Description of Unknown: RightRegion for integrase A1226 sequence

SEQ ID NO: 38659 - DNA, 260 bp, Unknown; identical to SEQ ID NO: 38653
  Description of Unknown: RightRegion for integrase A1227 sequence

SEQ ID NO: 38660 - DNA, 260 bp, Unknown
  Description of Unknown: RightRegion for integrase A1228 sequence
aaaggaattaaagggaagcgccagaactcattgaagattacgggtatagagttttattaattggaagttcggaataactatgcagttacctcgttcgccaattatttttcgcaatataaaaagtcccacttaaaacaatcattttaagcgggactttttatattgagtaactaaaattatttagctgctacttcttcgccattgtaagaaccacagtttttacatacacggtgtgataatttgtattcgccacagtttgg

SEQ ID NO: 38661 - DNA, 260 bp, Unknown; identical to SEQ ID NO: 37479
  Description of Unknown: RightRegion for integrase A1229 sequence

SEQ ID NO: 38662 - DNA, 260 bp, Unknown; identical to SEQ ID NO: 25647
  Description of Unknown: RightRegion for integrase A1230 sequence

SEQ ID NO: 38663 - DNA, 260 bp, Unknown; identical to SEQ ID NO: 24864
  Description of Unknown: RightRegion for integrase A1231 sequence

SEQ ID NO: 38664 - DNA, 260 bp, Unknown; identical to SEQ ID NO: 37479
  Description of Unknown: RightRegion for integrase A1232 sequence

SEQ ID NO: 38665 - DNA, 260 bp, Unknown; identical to SEQ ID NO: 37455
  Description of Unknown: RightRegion for integrase A1233 sequence

SEQ ID NO: 38666 - DNA, 260 bp, Unknown; identical to SEQ ID NO: 38633
  Description of Unknown: RightRegion for integrase A1234 sequence

SEQ ID NO: 38667 - DNA, 260 bp, Unknown; identical to SEQ ID NO: 37846
  Description of Unknown: RightRegion for integrase A1235 sequence

SEQ ID NO: 38668 - DNA, 260 bp, Unknown; identical to SEQ ID NO: 37846
  Description of Unknown: RightRegion for integrase A1236 sequence

SEQ ID NO: 38669 - DNA, 89 bp, Unknown; identical to SEQ ID NO: 24761
  Description of Unknown: RightRegion for integrase A1237 sequence

SEQ ID NO: 38670 - DNA, 260 bp, Unknown; identical to SEQ ID NO: 25656
  Description of Unknown: RightRegion for integrase A1238 sequence

SEQ ID NO: 38671 - DNA, 260 bp, Unknown
  Description of Unknown: RightRegion for integrase A1239 sequence
actggtaacactagccggaaaaggaattcgcttaaaattactagtatcgaattttattaataaactatggaagtatgtacagtcttgcaaccacggttgtatcccgtctaaagtactcgtacatgatgggattgatggtacagactttggtactgccttttcaagaaaaaaagacgtagtcagcgcactaaataagaaaaactatgataacttagcaaatgatacaaacattgaagtattcaattacaaagcgcaattca

SEQ ID NO: 38672 - DNA, 260 bp, Unknown; identical to SEQ ID NO: 25647
  Description of Unknown: RightRegion for integrase A1240 sequence

SEQ ID NO: 38673 - DNA, 152 bp, Unknown
  Description of Unknown: RightRegion for integrase A1241 sequence
cacgttaaaagagggaaaactaagcattctatcaaaataaaaaacattgatttttattaacttcttttgtgcggaactacgaacagttcattaatacgaagtgtacaaacttccatacaaaaataaccacgtcaattaagacgtggtttcta

SEQ ID NO: 38674 - DNA, 152 bp, Unknown; identical to SEQ ID NO: 38673
  Description of Unknown: RightRegion for integrase A1242 sequence

SEQ ID NO: 38675 - DNA, 260 bp, Unknown
  Description of Unknown: RightRegion for integrase A1243 sequence
aaataacccctatcctaaggtttaatttcatttttgacctcacagccactaataatttccactaagaaaagtagtaagtatcttaaaaaacagataaagctgtatctcctgtgaacacaatgggtgccaccaagctgttatctgaaaagctgtttcatcaagcaaaccgccacgtccaaaacaaaggaaccttgttttgttcggtccgctttggaaatgttctcggttccagaggttcggtcatccccatattatttgaa

SEQ ID NO: 38676 - DNA, 72 bp, Unknown; identical to SEQ ID NO: 38634
  Description of Unknown: RightRegion for integrase A1244 sequence

SEQ ID NO: 38677 - DNA, 260 bp, Unknown
  Description of Unknown: RightRegion for integrase A1245 sequence
cgagggcggccgttcgatggagacgagcgggtcaagatcaaatgggcggcgaggacgtagcggagtgaacacctcggaacgttcctaggtggctcgtgtgagctaggccacaacagaacacgatcagcggtcacggtgcctcacgcattgtggccgcttttcgtttgggggcgtttcacgccgacacagcggagagggtgaacaacactaccgacacccctctgacctgctcttatgttgtggagtgttgattctgatat

SEQ ID NO: 38678 - DNA, 45 bp, Lomovskayavirus C31
tgcgggtgccagggcgtgcccttgggctccccgggcgcgtactcc

SEQ ID NO: 38679 - DNA, 34 bp, Lomovskayavirus BT1
caggtttttgacgaaagtgatccagatgatccag

SEQ ID NO: 38680 - DNA, 53 bp, Unknown
  Description of Unknown: Streptomyces phage SV1 sequence
catcagggcggtcaggccgtagatgtggaagaaacggcagcacggcgaggacg

SEQ ID NO: 38681 - DNA, 50 bp, Unknown
  Description of Unknown: Streptomyces phage Joe sequence
atctggatgtgggtgtccatctgcgggcagacgccgcagtcgaagcacgg

SEQ ID NO: 38682 - DNA, 42 bp, Unknown
  Description of Unknown: Mycobacterium phage Bxz2 sequence
cggtctccatcgggatctgctgatcgagcagcatgccgacca

SEQ ID NO: 38683 - DNA, 42 bp, Unknown; identical to SEQ ID NO: 38682
  Description of Unknown: Mycobacterium phage Peaches sequence

SEQ ID NO: 38684 - DNA, 38 bp, Unknown
  Description of Unknown: Mycobacterium phage Bxb1 sequence
ggcttgtcgacgacggcggtctccgtcgtcaggatcat

SEQ ID NO: 38685 - DNA, 53 bp, Unknown
  Description of Unknown: Lactococcus phage TP901-1 sequence
atgccaacacaattaacatctcaatcaaggtaaatgctttttgctttttttgc

SEQ ID NO: 38686 - DNA, 64 bp, Unknown
  Description of Unknown: Streptomyces phage R4 sequence
gcatgttccccaaagcgataccacttgaagcagtggtactgcttgtgggtacactctgcgggtg

SEQ ID NO: 38687 - DNA, 42 bp, Unknown
  Description of Unknown: Enterococcus phage EFC-1 sequence
caaaggatcactgaatcaaaagtattgctcatccacgcgaaa

SEQ ID NO: 38688 - DNA, 62 bp, Unknown
  Description of Unknown: Streptococcus phage phi-m46.1 sequence
gtagatttgtttccccagacgcacacgtggagtgtgtaagtttacttgagaaacggagttaa

SEQ ID NO: 38689 - DNA, 40 bp, Unknown
  Description of Unknown: Listeria phage A118 sequence
tttcggatcaagctatgaaggacgcaaagagggaactaaa

SEQ ID NO: 38690 - DNA, 62 bp, Unknown
  Description of Unknown: Lactobacillus phage LR1 sequence
aagtgtccaagctggcccccgatcccagtttcaatagtttggggaatctttgtaagtggtaa

SEQ ID NO: 38691 - DNA, 58 bp, Bacillus subtilis
cacccattgtgttcacaggagatacagctttatctgtactgatattaatgacatgctg

SEQ ID NO: 38692 - DNA, 71 bp, Unknown
  Description of Unknown: Bacillus phage WBeta sequence
cggaaggtagcgtcaacgataggtgtaactgtcgtgtttgtaacggtacttccaacagctggcgccgccac

SEQ ID NO: 38693 - DNA, 62 bp, Streptococcus suis
cttccagcacatcacccacatggtctgtgtcggtgtgcgtcagcactagactatcaatccta

SEQ ID NO: 38694 - DNA, 61 bp, Bacillus amyloliquefaciens
ttttttccgcctgtcgtaaccggatctgttgtaacgattatcggaatgaccttgatgccgg

SEQ ID NO: 38695 - DNA, 61 bp, Staphylococcus epidermidis
acttccaattaacccttcaccagccctataccaagttcctgtcgcgcatcctccagctaat

SEQ ID NO: 38696 - DNA, 62 bp, Clostridium botulinum
actacttaatatatccataagagaaatttcatttccttctttgtctacccctataggatctt

SEQ ID NO: 38697 - DNA, 62 bp, Clostridium botulinum
acgaaataaaagattgtatagatgctggtaggaaacatgcccttgtcatttagctgaaacag

SEQ ID NO: 38698 - DNA, 61 bp, Clostridioides difficile
tattctaagtaatgtagttttaccacatccactaggtccgagtaaacatagaaattcccct

SEQ ID NO: 38699 - DNA, 65 bp, Clostridium botulinum
atggattttgcagattcccagatgcccctacagaaagaggtacaaaacatttattggaattaatt

SEQ ID NO: 38700 - DNA, 66 bp, Staphylococcus lugdunensis
gttcgtggtaactatgggtggtacaggtgccacattagttgtaccatttatgtttatgtggttaac

SEQ ID NO: 38701 - DNA, 61 bp, Geobacillus thermoglucosidasius
caagaaacgttccgtctgtttgtgtcagctgcgcgaaattaatgaccggatcgtttgttcc

SEQ ID NO: 38702 - DNA, 62 bp, Rhodobacter sphaeroides
ggaactccgccgggcccatctggtcgaagaagatgaaggggcccaccatctgcctccgggcc

SEQ ID NO: 38703 - DNA, 62 bp, Burkholderia multivorans
gatacggatgttcgtcgccggcacgctggtcacgctcggcaatcccaagatcatgctgttct

SEQ ID NO: 38704 - DNA, 40 bp, Mycobacterium tuberculosis
gaaggtgttggtgcggggttggccgtggtcgaggtggggt

SEQ ID NO: 38705 - DNA, 59 bp, Streptomyces scabiei
ggacggcgcagaaggggagtagctcttcgccggaccgtcgacatactgctcagctcgtc

SEQ ID NO: 38706 - DNA, 64 bp, Bacillus cytotoxicus
gcatacattgttgttgtttttccagatccagttggtcctgtaaatataagcaatccatgtgagt

SEQ ID NO: 38707 - DNA, 52 bp, Listeria innocua
taactttttcggatcgagttatgatggacgtaaagagggaacaaagcatcta

SEQ ID NO: 38708 - DNA, 40 bp, Unknown; identical to SEQ ID NO: 38689
  Description of Unknown: Shuttle integration vector pPL1 sequence

SEQ ID NO: 38709 - DNA, 32 bp, Unknown
  Description of Unknown: Brochothrix phage BL3 sequence
tttccacagacaactcacgtggaggtagtcac

SEQ ID NO: 38710 - DNA, 62 bp, Enterococcus faecalis
ttctggaccatgatgcgccacttccgaaatttcaaaaagatcagtggtcaaacggctcatta

SEQ ID NO: 38711 - DNA, 62 bp, Listeria monocytogenes
ctgtaactttttcggatcaagctatgagggacgcaaagagggaactaaacacttaattggtg

SEQ ID NO: 38712 - DNA, 61 bp, Clostridium botulinum
tattcaattatgtgtcgtaatttttatctattgcgacgaaaaaacaccataaaattctaac

SEQ ID NO: 38713 - DNA, 61 bp, Clostridium botulinum
agaaatagacctttcaactggacaaggtgctgataaaactatgcagcaagtcttaagtaaa

SEQ ID NO: 38714 - DNA, 65 bp, Staphylococcus aureus
tttatattgcgaaaaataattggcgaacgaggtaactggatacctcatccgccaattaaaatttg

SEQ ID NO: 38715 - DNA, 62 bp, Listeria innocua
ttattgcaagaaaaatgggttataagtacacatcaggttatagtaatatcgaaaaaggaagc

SEQ ID NO: 38716 - DNA, 62 bp, Rhodococcus jostii
atcgcgcagaacggtgcggtgatcagtgagtacgcaccgggcacgacaccggcgaagcatcg

SEQ ID NO: 38717 - DNA, 62 bp, Bacillus cereus
gtaatatgtttggatatggggaagtgaatcagtacaaccgccacagtaccctcatgtcagcc

SEQ ID NO: 38718 - DNA, 62 bp, Bacillus weihenstephanensis
tttgtagccattaggcgcattaggttgacgccattaagccctaaagcatcattcgtcgaaac

SEQ ID NO: 38719 - DNA, 62 bp, Unknown
  Description of Unknown: Streptococcus phage 370.1 sequence
gtttgtaaaggagactgataatggcatgtacaactatactcgtcggtaaaaaggcatcttat

SEQ ID NO: 38720 - DNA, 62 bp, Lactococcus lactis
aatactaataatagctagtacaattaacatctctatcaaagtaaaagcttttagctctttct

SEQ ID NO: 38721 - DNA, 62 bp, Streptococcus pneumoniae
tctggtgtagacgttaaacgtccaatcaagataactttattatacatattttcttcctccta

SEQ ID NO: 38722 - DNA, 63 bp, Streptococcus mitis
taggaggaaaaaatatgtataataaagttatcatgattgggcgtttgacgtctacaccagaat

SEQ ID NO: 38723 - DNA, 66 bp, Streptococcus equi
ttccaaagagcgcccaacgcgacctgaaatttgaataagactgctgcttgtgtaaaggcgatgatt

SEQ ID NO: 38724 - DNA, 65 bp, Staphylococcus haemolyticus
caatcatcagataactatggcggcacgtgcattaaccacggttgtatcccgtctaaagtactcgt

SEQ ID NO: 38725 - DNA, 64 bp, Staphylococcus lugdunensis
aatctgcaaacatgtatggcggtacatgtatcaacattggttgtattcctacaaagacactcat

SEQ ID NO: 38726 - DNA, 56 bp, Phietavirus MR11
cgaaaatgtatggaggcacttgtatcaatataggatgtataccttcgaagacactt

SEQ ID NO: 38727 - DNA, 62 bp, Geobacillus sp.
agacgagaaacgttccgtccgtctgggtcagttgggcaaagttgatgaccgggtcgtccgtt

SEQ ID NO: 38728 - DNA, 62 bp, Streptococcus pneumoniae
agcacgctgataatcagcaagaccaccaacatttccaccaatgtaaaagctttaaccttagc

SEQ ID NO: 38729 - DNA, 61 bp, Unknown
  Description of Unknown: Streptomyces phage phiK38-1 sequence
gagcgccggatcagggagtggacggcctgggagcgctacacgctgtggctgcggtcggtgc

SEQ ID NO: 38730 - DNA, 46 bp, Unknown
  Description of Unknown: Streptomyces phage TG1 sequence
tccagcccaacagtgttagtctttgctcttacccagttgggcggga

SEQ ID NO: 38731 - DNA, 42 bp, Lomovskayavirus C31
gtgccccaactggggtaacctttgagttctctcagttggggg

SEQ ID NO: 38732 - DNA, 52 bp, Lomovskayavirus BT1
ggtgctgggttgttgtctctggacagtgatccatgggaaactactcagcacc

SEQ ID NO: 38733 - DNA, 52 bp, Unknown
  Description of Unknown: Streptomyces phage SV1 sequence
atgtggtcctttagatccactgacgtgggtcagtgtctctaaaggactcgcg

SEQ ID NO: 38734 - DNA, 47 bp, Unknown
  Description of Unknown: Streptomyces phage Joe sequence
agttgtggccatgtgtccatctgggggcagatggagacggggtcaca

SEQ ID NO: 38735 - DNA, 52 bp, Unknown
  Description of Unknown: Mycobacterium phage Bxz2 sequence
taaccgcaagtgtacatccctcggctggccgagacaagtacagttgcgacag

SEQ ID NO: 38736 - DNA, 52 bp, Unknown
  Description of Unknown: Mycobacterium phage Peaches sequence
tagtttccaatgttacaggaactgctggcagaatccaacacattggaagtcg

SEQ ID NO: 38737 - DNA, 48 bp, Unknown
  Description of Unknown: Mycobacterium phage Bxb1 sequence
ggtttgtctggtcaaccaccgcggtctcagtggtgtacggtacaaacc

SEQ ID NO: 38738 - DNA, 53 bp, Unknown
  Description of Unknown: Lactococcus phage TP901-1 sequence
gagtttttatttcgtttatttcaattaaggtaactaaaaaactccttttaagg

SEQ ID NO: 38739 - DNA, 50 bp, Unknown
  Description of Unknown: Streptomyces phage R4 sequence
tgttccccaaagcgataccacttgaagcagtggtactgcttgtgggtaca

SEQ ID NO: 38740 - DNA, 54 bp, Unknown
  Description of Unknown: Enterococcus phage EFC-1 sequence
attttaggtatatgattttgtttattagtgtaaataacactatgtacctaaaat

SEQ ID NO: 38741 - DNA, 62 bp, Unknown
  Description of Unknown: Streptococcus phage phi-m46.1 sequence
tattagtatagaagaaagctctcagcacacgtggagtgtgttgctctctgctcgtaaagcct

SEQ ID NO: 38742 - DNA, 40 bp, Unknown
  Description of Unknown: Listeria phage A118 sequence
ttcctcgttttctctcgttggaagaagaagaaacgagaaa

SEQ ID NO: 38743 - DNA, 62 bp, Unknown
  Description of Unknown: Lactobacillus phage LR1 sequence
tataatttcgtatattagatataaccggtttcaattggaaatacctaatatacgaaaaaagg

SEQ ID NO: 38744 - DNA, 56 bp, Bacillus subtilis
tgtagtaagtatcttaatatacagctttatctgttttttaagatacttactacttt

SEQ ID NO: 38745 - DNA, 63 bp, Unknown
  Description of Unknown: Bacillus phage WBeta sequence
ctagttttaaagttggttattagttactgtgatatttatcacggtacccaataaccaatgaat

SEQ ID NO: 38746 - DNA, 62 bp, Streptococcus suis
ggtattgtatcaatttcagaactcacacttcggtatgcgtactcaatttgatacaattacaa

SEQ ID NO: 38747 - DNA, 62 bp, Bacillus amyloliquefaciens
cttttttgttgtacttaaacaataatgcttgtaagaattattgattgagtacgacataaacc

SEQ ID NO: 38748 - DNA, 61 bp, Staphylococcus epidermidis
ttatatttcgacttaattaagtacagttccacctagagatagactaaataaagtattatta

SEQ ID NO: 38749 - DNA, 62 bp, Clostridium botulinum
gttaggtgtatatcatacctaacgcaattcattacatcacatatgttatacacctactttaa

SEQ ID NO: 38750 - DNA, 62 bp, Clostridium botulinum
aaaagaatccaaattatcgtactttaacatagtgaatactgtccatcatgtataaaagtacg

SEQ ID NO: 38751 - DNA, 64 bp, Clostridioides difficile
tatataattatttggactaacatatagtatccacttggctattattagttagtccaaataaata

SEQ ID NO: 38752 - DNA, 65 bp, Clostridium botulinum
gtttatatgtttactaataagacgctctcaacccataaagtcttattagtaaacatatttcaact

SEQ ID NO: 38753 - DNA, 65 bp, Staphylococcus lugdunensis
tttttgtatgttagttgtgtcactgggtagacctaaatagtgacacaactgctattaaaatttaa

SEQ ID NO: 38754 - DNA, 62 bp, Geobacillus thermoglucosidasius
ttataaacctgttttaaagttaactttacatgcctaacattaactcttatacaggttaaggt

SEQ ID NO: 38755 - DNA, 62 bp, Rhodobacter sphaeroides
atggggtcacaataccaatcatgttcaagaatgtgaagggtattttacccttgtcgtttcag

SEQ ID NO: 38756 - DNA, 62 bp, Burkholderia multivorans
agttgtctgataatatattttcggacacgctcggcaacccgaacgagagtcaaaatacattt

SEQ ID NO: 38757 - DNA, 52 bp, Mycobacterium tuberculosis
gtagtgtatctcacaggtccacggttggccgtggactgctgaagaacattcc

SEQ ID NO: 38758 - DNA, 63 bp, Streptomyces scabiei
gctcatgtatgtgtctacgcgagattctcgcccgagaacttctgcaaggcactgctcttggct

SEQ ID NO: 38759 - DNA, 64 bp, Bacillus cytotoxicus
caataacggttgtatttgtagaacttgaccagttgttttagtaacataaatacaactccgaata

SEQ ID NO: 38760 - DNA, 52 bp, Listeria innocua
gtttagtatctcgttatctctcgttggagggagaagaaacgggataccaaaa

SEQ ID NO: 38761 - DNA, 40 bp, Unknown
  Description of Unknown: Shuttle integration vector pPL1 sequence
ttcctcgttttctctcgttggacggaaacgaatcgagaaa

SEQ ID NO: 38762 - DNA, 33 bp, Unknown
  Description of Unknown: Brochothrix phage BL3 sequence
caatgaaaaactaggcatgtagaagttgtttgt

SEQ ID NO: 38763 - DNA, 62 bp, Enterococcus faecalis
gtatcttgatgtacaacattactctttattttcaaatacagaataatgttgcatataatatt

SEQ ID NO: 38764 - DNA, 62 bp, Listeria monocytogenes
ttgtttagtccctcgttttctctcgttggacggagacgaatcgagaaactaaaattataaat

SEQ ID NO: 38765 - DNA, 62 bp, Clostridium botulinum
tatatacttatagatactaaatatttttgtattgcgtaacttcttctacacctgtaatatct

SEQ ID NO: 38766 - DNA, 62 bp, Clostridium botulinum
aaatataacctgtgtattgaaacaaggtgctgataaaaccctttcataaacacaagtaaata

SEQ ID NO: 38767 - DNA, 62 bp, Staphylococcus aureus
gtggttgtttttgttggaagtgtgtatcaggtatctgcatagttattccgaacttccaatta

SEQ ID NO: 38768 - DNA, 62 bp, Listeria innocua
ttatataaaatagtgtttttgtaaagtacacatcaccatatttgacaaaaaacctataaata

SEQ ID NO: 38769 - DNA, 59 bp, Rhodococcus jostii
ctatgtggtggtaatagcgagtaggggactactcgctccaggtacattaacaccatgga

SEQ ID NO: 38770 - DNA, 62 bp, Bacillus cereus
ataatagtgtatatggtagagaattaaaccagtttaatactccaccatgtacacgcagtgag

SEQ ID NO: 38771 - DNA, 62 bp, Bacillus weihenstephanensis
cgtcaccttgttggcgtaattagatttactccaacagggtgatgacaaagctaatgaatttt

SEQ ID NO: 38772 - DNA, 65 bp, Unknown
  Description of Unknown: Streptococcus phage 370.1 sequence
atggataaaaaaatacagcgtttttcatgtacaactatactagttgtagtgcctaaataatgctt

SEQ ID NO: 38773 - DNA, 60 bp, Lactococcus lactis
cgcttaattgcgagtttttatttcgcttatctcaattaaggtaactaaaaaactcctttt

SEQ ID NO: 38774 - DNA, 62 bp, Streptococcus pneumoniae
tatttctgtattttagtcaaagtaattaagataagttagagttagtaacagtattttaactt

SEQ ID NO: 38775 - DNA, 61 bp, Streptococcus mitis
gttaataatatgtatttaagtctaacttatcatgacaaatttgactaaaatacaaaaaggc

SEQ ID NO: 38776 - DNA, 62 bp, Streptococcus equi
aaaaattacaaagttttcaacccttgatttgaattagcggtcaaataatttgtaattcgttt

SEQ ID NO: 38777 - DNA, 64 bp, Staphylococcus haemolyticus
ttaataaactatggaagtatgtacagtcttgcaatgttgagtgaacaaacttccataataaaat

SEQ ID NO: 38778 - DNA, 61 bp, Staphylococcus lugdunensis
atttttgtacggaagtagatactatctttcaatatccatgttacttagtgccatacaaaaa

SEQ ID NO: 38779 - DNA, 55 bp, Phietavirus MR11
tttgtgcggaactacgaacagttcattaatacgaagtgtacaaacttccatacaa

SEQ ID NO: 38780 - DNA, 66 bp, Geobacillus sp.
gtgttataaacctgtgtgagagttaagtttacatgcctaaccttaacttttacgcaggttcagctt

SEQ ID NO: 38781 - DNA, 62 bp, Streptococcus pneumoniae
ggaaaatataaataattttagtaacctacatctcaatcaaggatagtaaaactctcactctt

SEQ ID NO: 38782 - DNA, 60 bp, Unknown
  Description of Unknown: Streptomyces phage phiK38-1 sequence
ccctaatacgcaagtcgataactctcctgggagcgttgacaacttgcgcaccctgatctg

SEQ ID NO: 38783 - DNA, 47 bp, Unknown
  Description of Unknown: Streptomyces phage TG1 sequence
gatcagctccgcgggcaagacctttctccttcacggggtggaaggtc

SEQ ID NO: 38784 - DNA, 25 bp, Unknown
  Description of Unknown: Erysipelothrix phage phi1605 sequence
ttacatcttcaagctcacttgcaac

SEQ ID NO: 38785 - DNA, 25 bp, Unknown
  Description of Unknown: Streptomyces phage SV1 sequence
cgcggtcgcgccgcgtgcggtcgtt

SEQ ID NO: 38786 - DNA, 25 bp, Unknown
  Description of Unknown: Clostridium phage HM T sequence
gctacatagtcgccagtacctccct

SEQ ID NO: 38787 - DNA, 25 bp, Unknown
  Description of Unknown: Streptococcus phage Javan255 sequence
tcaggtagtgaaccgttttttgttg

SEQ ID NO: 38788 - DNA, 25 bp, Unknown
  Description of Unknown: Streptococcus phage Javan639 sequence
aattagtagtgaaccgttttttgtg

SEQ ID NO: 38789 - DNA, 25 bp, Unknown
  Description of Unknown: Erysipelothrix phage phi1605 sequence
ttacatcttcaagctcacttgcaac

SEQ ID NO: 38790 - DNA, 25 bp, Unknown
  Description of Unknown: Streptococcus phage Javan122 sequence
tctcgtattgaggtggcgatttttt

SEQ ID NO: 38791 - DNA, 25 bp, Unknown
  Description of Unknown: Streptococcus phage Javan261 sequence
agaattatataataatacccatggt

SEQ ID NO: 38792 - DNA, 25 bp, Unknown
  Description of Unknown: Faecalibacterium phage FP_Epona sequence
tataaacaacatagagcggtcaata

SEQ ID NO: 38793 - DNA, 25 bp, Unknown
  Description of Unknown: Faecalibacterium phage FP_Toutatis sequence
gctttttgaaaaaacggaggtttca

SEQ ID NO: 38794 - DNA, 25 bp, Unknown
  Description of Unknown: Streptococcus phage Javan422 sequence
caaatttatcagatttttttgacat

SEQ ID NO: 38795 - DNA, 25 bp, Unknown
  Description of Unknown: Caldibacillus phage CBP1 sequence
attcacaaatgatcgggaggggaag

SEQ ID NO: 38796 - DNA, 25 bp, Unknown
  Description of Unknown: Clostridium phage phiCT9441A sequence
tctgtacctaaaacatccattaaag

SEQ ID NO: 38797 - DNA, 25 bp, Unknown
  Description of Unknown: Streptococcus phage Javan215 sequence
ctatgtcaacgacttactcaaactt

SEQ ID NO: 38798 - DNA, 25 bp, Unknown
  Description of Unknown: Streptococcus phage Javan202 sequence
cgccctctttaccaattattcagcg

SEQ ID NO: 38799 - DNA, 25 bp, Unknown
  Description of Unknown: Streptococcus phage Javan444 sequence
tcttatgaaaaaggagcttgtcctt

SEQ ID NO: 38800 - DNA, 25 bp, Unknown
  Description of Unknown: Streptococcus phage phiARI0004 sequence
aaaagcacgctgataatcagcaaga

SEQ ID NO: 38801 - DNA, 25 bp, Unknown
  Description of Unknown: Streptococcus phage Javan241 sequence
tttatccgcattttccgatgcgttt

SEQ ID NO: 38802 - DNA, 25 bp, Unknown
  Description of Unknown: Streptococcus phage Javan206 sequence
atataacaaaagcgagcgaggtagt

SEQ ID NO: 38803 - DNA, 25 bp, Unknown
  Description of Unknown: Streptococcus phage Javan394 sequence
agatactctttccaacctatttgtt

SEQ ID NO: 38804 - DNA, 25 bp, Unknown
  Description of Unknown: Paenibacillus phage phiERICV sequence
agttcttggggaatcaaatgaagag

SEQ ID NO: 38805 - DNA, 25 bp, Unknown
  Description of Unknown: Streptococcus phage Javan247 sequence
attttatcagagtttccgctctgtt

SEQ ID NO: 38806 - DNA, 25 bp, Unknown
  Description of Unknown: Streptococcus phage Javan645 sequence
gtatatttaaagtctatttaaacag

SEQ ID NO: 38807 - DNA, 25 bp, Unknown
  Description of Unknown: Streptococcus phage Javan116 sequence
aacaccagtctttcgactggtgcaa

SEQ ID NO: 38808 - DNA, 25 bp, Unknown
  Description of Unknown: Streptococcus phage Javan210 sequence
taatatcaacgacttacacaaactt

SEQ ID NO: 38809 - DNA, 25 bp, Unknown
  Description of Unknown: Streptococcus phage Javan284 sequence
agacggtcaacagaccgccttttat

SEQ ID NO: 38810 - DNA, 25 bp, Unknown
  Description of Unknown: Streptococcus phage Javan117 sequence
aaagataaaacaaaagaggtaaaac

SEQ ID NO: 38811 - DNA, 25 bp, Unknown
  Description of Unknown: Acidithiobacillus phage AcaML1 sequence
ccccagagagacgggtttgtctttt

SEQ ID NO: 38812 - DNA, 25 bp, Unknown
  Description of Unknown: Streptococcus phage phiJH1301-2 sequence
agtggtccaaaaatagaaagtagaa

SEQ ID NO: 38813 - DNA, 25 bp, Unknown
  Description of Unknown: Streptococcus phage Javan123 sequence
ctcaattgtgaggtggcgatttttt

SEQ ID NO: 38814 - DNA, 25 bp, Unknown
  Description of Unknown: Streptococcus phage Javan369 sequence
ctcaattgtgaggtggcgatttttt

SEQ ID NO: 38815 - DNA, 25 bp, Unknown
  Description of Unknown: Streptococcus phage Javan405 sequence
ccttgaagatgcgaaaggactctag

SEQ ID NO: 38816 - DNA, 25 bp, Unknown
  Description of Unknown: Streptococcus phage Javan575 sequence
cctcaattgcgaggtggcgattttt

SEQ ID NO: 38817 - DNA, 25 bp, Unknown
  Description of Unknown: Streptococcus phage Javan424 sequence
atctcaattgaggtggcgatttttt

SEQ ID NO: 38818 - DNA, 25 bp, Unknown
  Description of Unknown: Streptococcus phage Javan618 sequence
tcaatttctgaggtggcgatttttt

SEQ ID NO: 38819 - DNA, 25 bp, Unknown
  Description of Unknown: Streptococcus phage Javan638 sequence
catctcaattgaggtggcgattttt

SEQ ID NO: 38820 - DNA, 24 bp, Unknown
  Description of Unknown: Streptococcus phage phi-SsuSSJ27_rum sequence
ttatcttggactattttcttagcc

SEQ ID NO: 38821 - DNA, 25 bp, Unknown
  Description of Unknown: Streptococcus phage phi-SsuSSJ28_rum sequence
gtggtcccaaaatagaaagtagaat

SEQ ID NO: 38822 - DNA, 25 bp, Unknown
  Description of Unknown: Streptococcus phage Javan239 sequence
ctcaattacgaggtggcgatttttt

SEQ ID NO: 38823 - DNA, 25 bp, Unknown
  Description of Unknown: Streptococcus phage Javan122 sequence
tctcgtattgaggtggcgatttttt

SEQ ID NO: 38824 - DNA, 25 bp, Unknown
  Description of Unknown: Streptococcus phage Javan255 sequence
tcaggtagtgaaccgttttttgttg

SEQ ID NO: 38825 - DNA, 25 bp, Unknown
  Description of Unknown: Streptococcus phage Javan101 sequence
attgggtagtgaaccgttttttgtg

SEQ ID NO: 38826 - DNA, 25 bp, Unknown
  Description of Unknown: Streptococcus phage Javan639 sequence
aattagtagtgaaccgttttttgtg

SEQ ID NO: 38827 - DNA, 25 bp, Unknown
  Description of Unknown: Erysipelothrix phage phi1605 sequence
aaatgatgggacgaagctattatgc

SEQ ID NO: 38828 - DNA, 25 bp, Unknown
  Description of Unknown: Streptomyces phage SV1 sequence
ggggtccggcaggaacagccgccag

SEQ ID NO: 38829 - DNA, 25 bp, Unknown
  Description of Unknown: Clostridium phage HM T sequence
ctgcagtggcagcaaaatcaatgtt

SEQ ID NO: 38830 - DNA, 25 bp, Unknown
  Description of Unknown: Streptococcus phage Javan255 sequence
tcctcatcactctttattttttgaa

SEQ ID NO: 38831 - DNA, 25 bp, Unknown
  Description of Unknown: Streptococcus phage Javan639 sequence
aagacaagatgtgtcaattcggcac

SEQ ID NO: 38832 - DNA, 25 bp, Unknown
  Description of Unknown: Erysipelothrix phage phi1605 sequence
aaatgatgggacgaagctattatgc

SEQ ID NO: 38833 - DNA, 25 bp, Unknown
  Description of Unknown: Streptococcus phage Javan122 sequence
ttatgtgtgcgttgcctaaaaaatg

SEQ ID NO: 38834 - DNA, 25 bp, Unknown
  Description of Unknown: Streptococcus phage Javan261 sequence
tctggctgttttttatgaatggaat

SEQ ID NO: 38835 - DNA, 25 bp, Unknown
  Description of Unknown: Faecalibacterium phage FP_Epona sequence
tgctatatctgctattctgttacgc

SEQ ID NO: 38836 - DNA, 25 bp, Unknown
  Description of Unknown: Faecalibacterium phage FP_Toutatis sequence
ccccattcaagcgcgctaccaaaac

SEQ ID NO: 38837 - DNA, 25 bp, Unknown
  Description of Unknown: Streptococcus phage Javan422 sequence
atggcttttttgtgattagcaaaag

SEQ ID NO: 38838 - DNA, 25 bp, Unknown
  Description of Unknown: Caldibacillus phage CBP1 sequence
gagcgtttttgttttgcaaagggta

SEQ ID NO: 38839 - DNA, 25 bp, Unknown
  Description of Unknown: Clostridium phage phiCT9441A sequence
ctattcctattggatcttgaagata

SEQ ID NO: 38840 - DNA, 25 bp, Unknown
  Description of Unknown: Streptococcus phage Javan215 sequence
aggattttagtgtcattgattcaat

SEQ ID NO: 38841 - DNA, 25 bp, Unknown
  Description of Unknown: Streptococcus phage Javan202 sequence
aggattttagtgccattgattcaat

SEQ ID NO: 38842 - DNA, 25 bp, Unknown
  Description of Unknown: Streptococcus phage Javan444 sequence
agaaatttactatcctacatttcaa

SEQ ID NO: 38843 - DNA, 24 bp, Unknown
  Description of Unknown: Streptococcus phage phiARI0004 sequence
ttcgctcacaataagagagaactt

SEQ ID NO: 38844 - DNA, 25 bp, Unknown
  Description of Unknown: Streptococcus phage Javan241 sequence
gcgcaaaaaacaaacaaatttagat

SEQ ID NO: 38845 - DNA, 25 bp, Unknown
  Description of Unknown: Streptococcus phage Javan206 sequence
caaatttagtatcattcatttccac

SEQ ID NO: 38846 - DNA, 25 bp, Unknown
  Description of Unknown: Streptococcus phage Javan394 sequence
agtgtttaacttacacttatctcta

SEQ ID NO: 38847 - DNA, 25 bp, Unknown
  Description of Unknown: Paenibacillus phage phiERICV sequence
ggacatcctttgatcgcgtataccg

SEQ ID NO: 38848 - DNA, 25 bp, Unknown
  Description of Unknown: Streptococcus phage Javan247 sequence
ccctgttttgctaccgagtattaag

SEQ ID NO: 38849 - DNA, 25 bp, Unknown
  Description of Unknown: Streptococcus phage Javan645 sequence
atgtatcaagtgaacactattaata

SEQ ID NO: 38850 - DNA, 25 bp, Unknown
  Description of Unknown: Streptococcus phage Javan116 sequence
cggtattgtatcaagttaatcagaa

SEQ ID NO: 38851 - DNA, 25 bp, Unknown
  Description of Unknown: Streptococcus phage Javan210 sequence
aattacagtatttaggagcacctac

SEQ ID NO: 38852 - DNA, 25 bp, Unknown
  Description of Unknown: Streptococcus phage Javan284 sequence
aattactgtatttaggagcaccgac

SEQ ID NO: 38853 - DNA, 25 bp, Unknown
  Description of Unknown: Streptococcus phage Javan117 sequence
agcattatttaggtactacaactag

SEQ ID NO: 38854 - DNA, 25 bp, Unknown
  Description of Unknown: Acidithiobacillus phage AcaML1 sequence
aggcggcgggaatcgaacccgcgtc

SEQ ID NO: 38855 - DNA, 25 bp, Unknown
  Description of Unknown: Streptococcus phage phiJH1301-2 sequence
cgcatatctccttaaaaattttttc

SEQ ID NO: 38856 - DNA, 25 bp, Unknown
  Description of Unknown: Streptococcus phage Javan123 sequence
agtagacgaaaggctgtaacaaaag

SEQ ID NO: 38857 - DNA, 25 bp, Unknown
  Description of Unknown: Streptococcus phage Javan369 sequence
gtgactgtgactgaaaggttgcagt

SEQ ID NO: 38858 - DNA, 25 bp, Unknown
  Description of Unknown: Streptococcus phage Javan405 sequence
aaaagacaaagtcagtatagacttt

SEQ ID NO: 38859 - DNA, 25 bp, Unknown
  Description of Unknown: Streptococcus phage Javan575 sequence
gcactgatattttggaaagaactta

SEQ ID NO: 38860 - DNA, 25 bp, Unknown
  Description of Unknown: Streptococcus phage Javan424 sequence
gagactgcgaccgaaaggttgcgtt

SEQ ID NO: 38861 - DNA, 25 bp, Unknown
  Description of Unknown: Streptococcus phage Javan618 sequence
ggaattattctcctttcgaataaga

SEQ ID NO: 38862 - DNA, 25 bp, Unknown
  Description of Unknown: Streptococcus phage Javan638 sequence
gatactgcgaccgaaaggttgcggt

SEQ ID NO: 38863 - DNA, 25 bp, Unknown
  Description of Unknown: Streptococcus phage phi-SsuSSJ27_rum sequence
cgcatatctccttaaaaattttttc

SEQ ID NO: 38864 - DNA, 25 bp, Unknown
  Description of Unknown: Streptococcus phage phi-SsuSSJ28_rum sequence
ttttgagaagtcatcaaagtagtaa

SEQ ID NO: 38865 - DNA, 25 bp, Unknown
  Description of Unknown: Streptococcus phage Javan239 sequence
taagttaagaaaaaaatgaaactca

SEQ ID NO: 38866 - DNA, 25 bp, Unknown
  Description of Unknown: Streptococcus phage Javan122 sequence
ttatgtgtgcgttgcctaaaaaatg

SEQ ID NO: 38867 - DNA, 25 bp, Unknown
  Description of Unknown: Streptococcus phage Javan255 sequence
tcctcatcactctttattttttgaa

SEQ ID NO: 38868 - DNA, 25 bp, Unknown
  Description of Unknown: Streptococcus phage Javan101 sequence
ctttaaaaatggcttacggattgat

SEQ ID NO: 38869 - DNA, 25 bp, Unknown
  Description of Unknown: Streptococcus phage Javan639 sequence
aagacaagatgtgtcaattcggcac

SEQ ID NO: 38870 - DNA, 24 bp, Unknown
  Description of Unknown: Erysipelothrix phage phi1605 sequence
tggaagaaatgacgcgtctgtaaa

SEQ ID NO: 38871 - DNA, 24 bp, Unknown
  Description of Unknown: Streptomyces phage SV1 sequence
acccacgtcagtggatctaaagga

SEQ ID NO: 38872 - DNA, 24 bp, Unknown
  Description of Unknown: Clostridium phage HM T sequence
aaatgctcggtacatgaaaaagcg

SEQ ID NO: 38873 - DNA, 24 bp, Unknown
  Description of Unknown: Streptococcus phage Javan255 sequence
ttagtctttttggtagaaggaaca

SEQ ID NO: 38874 - DNA, 24 bp, Unknown
  Description of Unknown: Streptococcus phage Javan639 sequence
ctagtctttctgatagaatgagca

SEQ ID NO: 38875 - DNA, 24 bp, Unknown
  Description of Unknown: Erysipelothrix phage phi1605 sequence
tggaagaaatgacgcgtctgtaaa

SEQ ID NO: 38876 - DNA, 24 bp, Unknown
  Description of Unknown: Streptococcus phage Javan122 sequence
ctagtctttttgatagaaaaagca

SEQ ID NO: 38877 - DNA, 24 bp, Unknown
  Description of Unknown: Streptococcus phage Javan261 sequence
ctagttaatttcaaaatatctcaa

SEQ ID NO: 38878 - DNA, 24 bp, Unknown
  Description of Unknown: Faecalibacterium phage FP_Epona sequence
ttgtgcattgtacaccttgataac

SEQ ID NO: 38879 - DNA, 24 bp, Unknown
  Description of Unknown: Faecalibacterium phage FP_Toutatis sequence
atgatctataccgtaggcgaaatg

SEQ ID NO: 38880 - DNA, 24 bp, Unknown
  Description of Unknown: Streptococcus phage Javan422 sequence
ttaatcccccttaacagtttccat

SEQ ID NO: 38881 - DNA, 24 bp, Unknown
  Description of Unknown: Caldibacillus phage CBP1 sequence
aatggaatatcatctgaaatctcg

SEQ ID NO: 38882 - DNA, 24 bp, Unknown
  Description of Unknown: Clostridium phage phiCT9441A sequence
tatttcattacctcttacatgtta

SEQ ID NO: 38883 - DNA, 24 bp, Unknown
  Description of Unknown: Streptococcus phage Javan215 sequence
ttataaatttttttcacgttcgga

SEQ ID NO: 38884 - DNA, 24 bp, Unknown
  Description of Unknown: Streptococcus phage Javan202 sequence
ttatcgtttcctagtcgggtattt

SEQ ID NO: 38885 - DNA, 24 bp, Unknown
  Description of Unknown: Streptococcus phage Javan444 sequence
ctaaactggttttttagagattgt

SEQ ID NO: 38886 - DNA, 24 bp, Unknown
  Description of Unknown: Streptococcus phage phiARI0004 sequence
caccaacatctcaatcaaggatag

SEQ ID NO: 38887 - DNA, 24 bp, Unknown
  Description of Unknown: Streptococcus phage Javan241 sequence
ttatttaaatgtaccccaagcgtc

SEQ ID NO: 38888 - DNA, 24 bp, Unknown
  Description of Unknown: Streptococcus phage Javan206 sequence
aaatgaaaaatcctttcaaatacg

SEQ ID NO: 38889 - DNA, 24 bp, Unknown
  Description of Unknown: Streptococcus phage Javan394 sequence
ttacatttcctcagcatcaataag

SEQ ID NO: 38890 - DNA, 24 bp, Unknown
  Description of Unknown: Paenibacillus phage phiERICV sequence
ctcctcatgcatatgataagtaat

SEQ ID NO: 38891 - DNA, 24 bp, Unknown
  Description of Unknown: Streptococcus phage Javan247 sequence
ttatgatagttcgccccaaaggtc

SEQ ID NO: 38892 - DNA, 24 bp, Unknown
  Description of Unknown: Streptococcus phage Javan645 sequence
aattattcatatttgccatttaaa

SEQ ID NO: 38893 - DNA, 24 bp, Unknown
  Description of Unknown: Streptococcus phage Javan116 sequence
tcaaaatgtatcaaagtcgtccga

SEQ ID NO: 38894 - DNA, 24 bp, Unknown
  Description of Unknown: Streptococcus phage Javan210 sequence
ttataaatttttttcacgttcgga

SEQ ID NO: 38895 - DNA, 24 bp, Unknown
  Description of Unknown: Streptococcus phage Javan284 sequence
ttaagcttgtaatttcatttcaag

SEQ ID NO: 38896 - DNA, 24 bp, Unknown
  Description of Unknown: Streptococcus phage Javan117 sequence
aaatgaaaatcaacgtaacaagct

SEQ ID NO: 38897 - DNA, 24 bp, Unknown
  Description of Unknown: Acidithiobacillus phage AcaML1 sequence
taaatggtggcggaacacggaacc

SEQ ID NO: 38898 - DNA, 24 bp, Unknown
  Description of Unknown: Streptococcus phage phiJH1301-2 sequence
tatgttaaagaaaaacgatattgt

SEQ ID NO: 38899 - DNA, 24 bp, Unknown
  Description of Unknown: Streptococcus phage Javan123 sequence
ctaatctttctgatagaataagca

SEQ ID NO: 38900 - DNA, 24 bp, Unknown
  Description of Unknown: Streptococcus phage Javan369 sequence
ctaatctttctgatagaatatgca

SEQ ID NO: 38901 - DNA, 24 bp, Unknown
  Description of Unknown: Streptococcus phage Javan405 sequence
atgacagataaacaacacgctctc

SEQ ID NO: 38902 - DNA, 24 bp, Unknown
  Description of Unknown: Streptococcus phage Javan575 sequence
gctaatctttctgatagaataagc

SEQ ID NO: 38903 - DNA, 24 bp, Unknown
  Description of Unknown: Streptococcus phage Javan424 sequence
tcagtctttttgatagaagaaaca

SEQ ID NO: 38904 - DNA, 24 bp, Unknown
  Description of Unknown: Streptococcus phage Javan618 sequence
ctaatctttctgatagaataagca

SEQ ID NO: 38905 - DNA, 24 bp, Unknown
  Description of Unknown: Streptococcus phage Javan638 sequence
gtcagtctttttgatagaagagac

SEQ ID NO: 38906 - DNA, 24 bp, Unknown
  Description of Unknown: Streptococcus phage phi-SsuSSJ27_rum sequence
atatgaaccctttctaatgtgagt

SEQ ID NO: 38907 - DNA, 24 bp, Unknown
  Description of Unknown: Streptococcus phage phi-SsuSSJ28_rum sequence
atgttaaagaaaaacgatattgtc

SEQ ID NO: 38908 - DNA, 24 bp, Unknown
  Description of Unknown: Streptococcus phage Javan239 sequence
ctagtctttttgatagaaaaagca

SEQ ID NO: 38909 - DNA, 24 bp, Unknown
  Description of Unknown: Streptococcus phage Javan122 sequence
ctagtctttttgatagaaaaagca

SEQ ID NO: 38910 - DNA, 24 bp, Unknown
  Description of Unknown: Streptococcus phage Javan255 sequence
ttagtctttttggtagaaggaaca

SEQ ID NO: 38911 - DNA, 24 bp, Unknown
  Description of Unknown: Streptococcus phage Javan101 sequence
ctagtccttctgatagaagaggca

SEQ ID NO: 38912 - DNA, 24 bp, Unknown
  Description of Unknown: Streptococcus phage Javan639 sequence
ctagtctttctgatagaatgagca

SEQ ID NO: 38913 - DNA, 25 bp, Unknown
  Description of Unknown: Erysipelothrix phage phi1605 sequence
tggaattcaagttaaatatcctaca

SEQ ID NO: 38914 - DNA, 25 bp, Unknown
  Description of Unknown: Streptomyces phage SV1 sequence
gcgagtcctttagagacactgaccc

SEQ ID NO: 38915 - DNA, 24 bp, Unknown
  Description of Unknown: Clostridium phage HM T sequence
tctttaatgtagcgcccaaatgct

SEQ ID NO: 38916 - DNA, 24 bp, Unknown
  Description of Unknown: Streptococcus phage Javan255 sequence
gtggtcaggaaattatcatttgat

SEQ ID NO: 38917 - DNA, 25 bp, Unknown
  Description of Unknown: Streptococcus phage Javan639 sequence
aaaatggtgttcggattgatttata

SEQ ID NO: 38918 - DNA, 25 bp, Unknown
  Description of Unknown: Erysipelothrix phage phi1605 sequence
tggaattcaagttaaatatcctaca

SEQ ID NO: 38919 - DNA, 25 bp, Unknown
  Description of Unknown: Streptococcus phage Javan122 sequence
tttcgaaactcttaggtagagtgta

SEQ ID NO: 38920 - DNA, 25 bp, Unknown
  Description of Unknown: Streptococcus phage Javan261 sequence
aaaacggtcaggttatcgaaatata

SEQ ID NO: 38921 - DNA, 25 bp, Unknown
  Description of Unknown: Faecalibacterium phage FP_Epona sequence
aaaacttacgtttttcaggtggctt

SEQ ID NO: 38922 - DNA, 24 bp, Unknown
  Description of Unknown: Faecalibacterium phage FP_Toutatis sequence
agaatcgaactcacggcctcttga

SEQ ID NO: 38923 - DNA, 24 bp, Unknown
  Description of Unknown: Streptococcus phage Javan422 sequence
aacgaacaagtcatatctatgtga

SEQ ID NO: 38924 - DNA, 25 bp, Unknown
  Description of Unknown: Caldibacillus phage CBP1 sequence
aaatcctttataaattcaaggttta

SEQ ID NO: 38925 - DNA, 24 bp, Unknown
  Description of Unknown: Clostridium phage phiCT9441A sequence
tagggtatttcattgccttcttta

SEQ ID NO: 38926 - DNA, 25 bp, Unknown
  Description of Unknown: Streptococcus phage Javan215 sequence
atatcaaaattatttttgattttta

SEQ ID NO: 38927 - DNA, 25 bp, Unknown
  Description of Unknown: Streptococcus phage Javan202 sequence
atatcaaaattatttttgattttta

SEQ ID NO: 38928 - DNA, 25 bp, Unknown
  Description of Unknown: Streptococcus phage Javan444 sequence
acattgctatcaagtggaagatata

SEQ ID NO: 38929 - DNA, 25 bp, Unknown
  Description of Unknown: Streptococcus phage phiARI0004 sequence
cttaccgaatgcaacacgagatcac

SEQ ID NO: 38930 - DNA, 25 bp, Unknown
  Description of Unknown: Streptococcus phage Javan241 sequence
atatcgagatcaagtggagaatttg

SEQ ID NO: 38931 - DNA, 25 bp, Unknown
  Description of Unknown: Streptococcus phage Javan206 sequence
gtatcaaaattttatggaaaattta

SEQ ID NO: 38932 - DNA, 25 bp, Unknown
  Description of Unknown: Streptococcus phage Javan394 sequence
acatggaaattttatttaaaaaata

SEQ ID NO: 38933 - DNA, 24 bp, Unknown
  Description of Unknown: Paenibacillus phage phiERICV sequence
tcgtatcaatggatcctcatgcat

SEQ ID NO: 38934 - DNA, 25 bp, Unknown
  Description of Unknown: Streptococcus phage Javan247 sequence
gcattgatatttttttcaattttta

SEQ ID NO: 38935 - DNA, 25 bp, Unknown
  Description of Unknown: Streptococcus phage Javan645 sequence
gaattgatatatttttgaattttta

SEQ ID NO: 38936 - DNA, 25 bp, Unknown
  Description of Unknown: Streptococcus phage Javan116 sequence
gcatagatttaatgctagatatata

SEQ ID NO: 38937 - DNA, 25 bp, Unknown
  Description of Unknown: Streptococcus phage Javan210 sequence
aaatcaacgttatttttaaattgta

SEQ ID NO: 38938 - DNA, 25 bp, Unknown
  Description of Unknown: Streptococcus phage Javan284 sequence
aaatcaacgttatttttaaattgta

SEQ ID NO: 38939 - DNA, 24 bp, Unknown
  Description of Unknown: Streptococcus phage Javan117 sequence
atcgatattatttttaagttttaa

SEQ ID NO: 38940 - DNA, 25 bp, Unknown
  Description of Unknown: Acidithiobacillus phage AcaML1 sequence
aagggttggccttgggtaaatggtg

SEQ ID NO: 38941 - DNA, 25 bp, Unknown
  Description of Unknown: Streptococcus phage phiJH1301-2 sequence
gtttgataggtttcttgataagtca

SEQ ID NO: 38942 - DNA, 25 bp, Unknown
  Description of Unknown: Streptococcus phage Javan123 sequence
tagaggggactgaggtagaattata

SEQ ID NO: 38943 - DNA, 25 bp, Unknown
  Description of Unknown: Streptococcus phage Javan369 sequence
tagaggggacagaggtagacttgta

SEQ ID NO: 38944 - DNA, 24 bp, Unknown
  Description of Unknown: Streptococcus phage Javan405 sequence
aaaattgaaaaactagttcattaa

SEQ ID NO: 38945 - DNA, 25 bp, Unknown
  Description of Unknown: Streptococcus phage Javan575 sequence
gaagaatggtgaccggtcataatta

SEQ ID NO: 38946 - DNA, 25 bp, Unknown
  Description of Unknown: Streptococcus phage Javan424 sequence
tcgaaggaacagaagttgacttata

SEQ ID NO: 38947 - DNA, 25 bp, Unknown
  Description of Unknown: Streptococcus phage Javan618 sequence
atgtcctggtcacttaaattcttca

SEQ ID NO: 38948 - DNA, 25 bp, Unknown
  Description of Unknown: Streptococcus phage Javan638 sequence
tggaaggaacagaagtcgacctgta

SEQ ID NO: 38949 - DNA, 25 bp, Unknown
  Description of Unknown: Streptococcus phage phi-SsuSSJ27_rum sequence
gtttgataggtttcttgataagtca

SEQ ID NO: 38950 - DNA, 25 bp, Unknown
  Description of Unknown: Streptococcus phage phi-SsuSSJ28_rum sequence
gtgtgagaagtgaagttggggaatg

SEQ ID NO: 38951 - DNA, 25 bp, Unknown
  Description of Unknown: Streptococcus phage Javan239 sequence
attgtgagttagtgggtacggatta

SEQ ID NO: 38952 - DNA, 25 bp, Unknown
  Description of Unknown: Streptococcus phage Javan122 sequence
tttcgaaactcttaggtagagtgta

SEQ ID NO: 38953 - DNA, 24 bp, Unknown
  Description of Unknown: Streptococcus phage Javan255 sequence
gtggtcaggaaattatcatttgat

SEQ ID NO: 38954 - DNA, 24 bp, Unknown
  Description of Unknown: Streptococcus phage Javan101 sequence
aagaagataagaaaatcagcctaa

SEQ ID NO: 38955 - DNA, 25 bp, Unknown
  Description of Unknown: Streptococcus phage Javan639 sequence
aaaatggtgttcggattgatttata

SEQ ID NO: 38956 - protein, 16 aa, Artificial Sequence
  Description of Artificial Sequence: Synthetic peptide
SGSETPGTSESATPES

SEQ ID NO: 38957 - protein, 4 aa, Artificial Sequence
  Description of Artificial Sequence: Synthetic peptide
SGGS

SEQ ID NO: 38958 - protein, 4 aa, Artificial Sequence
  Description of Artificial Sequence: Synthetic peptide
GGGS

SEQ ID NO: 38959 - protein, 5 aa, Artificial Sequence
  Description of Artificial Sequence: Synthetic peptide
GGGGS

SEQ ID NO: 38960 - protein, 5 aa, Artificial Sequence
  Description of Artificial Sequence: Synthetic peptide
EAAAK

SEQ ID NO: 38961 - DNA, 76 bp, Artificial Sequence
  Description of Artificial Sequence: Synthetic oligonucleotide
gttttagagctagaaatagcaagttaaaataaggctagtccgttatcaacttgaaaaagtgggaccgagtcggtcc

SEQ ID NO: 38962 - DNA, 38 bp, Unknown; identical to SEQ ID NO: 38684
  Description of Unknown: Integrase attB A204 sequence

SEQ ID NO: 38963 - DNA, 48 bp, Unknown; identical to SEQ ID NO: 38737
  Description of Unknown: Integrase Left or Right A204 sequence

SEQ ID NO: 38964 - skipped

SEQ ID NO: 38965 - DNA, 260 bp, Artificial Sequence
  Description of Artificial Sequence: Synthetic polynucleotide
tcaaaggttgatgttactgctgataatgtagatatcatatttaaattccaactcgcttaattgcgagtttttatttcgtttatttcaattaaggtaactaaaaaactccttttaaggagtttctgtaatcaattaatttcttcaatatattttatttggtcccatagttcatcagttatctcatgcatagaaggtttttgttttgtttgtattagatatcctttctccttaagcatgttaactactttctttagtttctg

SEQ ID NO: 38966 - DNA, 260 bp, Artificial Sequence
  Description of Artificial Sequence: Synthetic polynucleotide
ttaattaaaaaaatagacgtatggaacgataataaaattaagatccactggaatatttaattttttaggcgctttacgccttttttcgtatattaggtatttccaattgaaaccggttatatctaatatacgaaattatacaacaaaaagccccagtgaccattgcataatctgcaacaaccactagggctaaatttttattgacgttgtgagtaaacaactgaattgagttgctgttggttaacaccattggcaatatc

SEQ ID NO: 38967 - protein, 30 aa, Artificial Sequence
  Description of Artificial Sequence: Synthetic polypeptide
MDSLLMNRRKFLYQFKNVRWAKGRRETYLC

SEQ ID NO: 38968 - protein, 28 aa, Artificial Sequence
  Description of Artificial Sequence: Synthetic peptide
PKKRKVEGADKRTADGSEFESPKKKRKV

SEQ ID NO: 38969 - protein, 22 aa, Artificial Sequence
  Description of Artificial Sequence: Synthetic peptide
RKSGKIAAIWKRPRKPKKKRKV

SEQ ID NO: 38970 - protein, 18 aa, Artificial Sequence
  Description of Artificial Sequence: Synthetic peptide
KRTADGSEFESPKKKRKV

SEQ ID NO: 38971 - protein, 17 aa, Artificial Sequence
  Description of Artificial Sequence: Synthetic peptide
KKTELQTTNAENKTKKL

SEQ ID NO: 38972 - protein, 19 aa, Artificial Sequence
  Description of Artificial Sequence: Synthetic peptide
KRGINDRNFWRGENGRKTR

SEQ ID NO: 38973 - protein, 16 aa, Artificial Sequence
  Description of Artificial Sequence: Synthetic peptide
KRPAATKKAGQAKKKK

SEQ ID NO: 38974 - protein, 16 aa, Artificial Sequence
  Description of Artificial Sequence: Synthetic peptide
KRPAATKKAGQAKKKK

SEQ ID NO: 38975 - protein, 29 aa, Artificial Sequence
  Description of Artificial Sequence: Synthetic peptide
PKKKRKVEGADKRTADGSEFESPKKKRKV

SEQ ID NO: 38976 - DNA, 306 bp, Artificial Sequence
  Description of Artificial Sequence: Synthetic polynucleotide
tgcctgtcatacgaaaccgagatactgacagtagaatatggccttctgccaatcgggaagattgtggagaaacggatagaatgcacagtttactctgtcgataacaatggtaacatttatactcagccagttgcccagtggcacgaccggggagagcaggaagtattcgaatactgtctggaggatggaagtctcattagggccactaaggaccacaaatttatgacagtcgatggccagatgctgcctatagacgaaatctttgagcgagagttggacctcatgcgagttgacaaccttcctaat

SEQ ID NO: 38977 - protein, 102 aa, Artificial Sequence
  Description of Artificial Sequence: Synthetic polypeptide
CLSYETEILTVEYGLLPIGKIVEKRIECTVYSVDNNGNIYTQPVAQWHDRGEQEVFEYCLEDGSLIRATKDHKFMTVDGQMLPIDEIFERELDLMRVDNLPN

SEQ ID NO: 38978 - DNA, 108 bp, Artificial Sequence
  Description of Artificial Sequence: Synthetic polynucleotide
atgatcaagatagctacaaggaagtatcttggcaaacaaaacgtttatgatattggagtcgaaagagatcacaactttgctctgaagaacggattcatagcttctaat

SEQ ID NO: 38979 - protein, 36 aa, Artificial Sequence
  Description of Artificial Sequence: Synthetic polypeptide
MIKIATRKYLGKQNVYDIGVERDHNFALKNGFIASN

SEQ ID NO: 38980 - DNA, 303 bp, Artificial Sequence
  Description of Artificial Sequence: Synthetic polynucleotide
tgcctgtcttatgataccgagatacttaccgttgaatatggcttcttgcctattggaaagattgtcgaagagagaattgaatgcacagtatatactgtagacaagaatggtttcgtttacacacagcccattgctcaatggcacaatcgcggcgaacaagaagtatttgagtactgtctcgaggatggaagcatcatacgagcaactaaagatcataaattcatgaccactgacgggcagatgttgccaatagatgagatattcgagcggggcttggatctcaaacaagtggatggattgcca

SEQ ID NO: 38981 - protein, 101 aa, Artificial Sequence
  Description of Artificial Sequence: Synthetic polypeptide
CLSYDTEILTVEYGFLPIGKIVEERIECTVYTVDKNGFVYTQPIAQWHNRGEQEVFEYCLEDGSIIRATKDHKFMTTDGQMLPIDEIFERGLDLKQVDGLP

SEQ ID NO: 38982 - DNA, 159 bp, Artificial Sequence
  Description of Artificial Sequence: Synthetic polynucleotide
atgaagaggactgccgatggatcagagtttgaatctcccaagaagaagaggaaagtaaagataatatctcgaaaaagtcttggtacccaaaatgtctatgatattggagtggagaaagatcacaacttccttctcaagaacggtctcgtagccagcaac

SEQ ID NO: 38983 - protein, 53 aa, Artificial Sequence
  Description of Artificial Sequence: Synthetic polypeptide
MKRTADGSEFESPKKKRKVKIISRKSLGTQNVYDIGVEKDHNFLLKNGLVASN

SEQ ID NO: 38984 - DNA, 250 bp, Homo sapiens
ccggtcccccccgccgggtccgcccccggggccgcggttccgcgcggcgcctcgcctcggccggcgcctagcagccgacttagaactggtgcggaccaggggaatccgactgtttaattaaaacaaagcatcgcgaaggcccgcggcgggtgttgacgcgatgtgatttctgcccagtgctctgaatgtcaaagtgaagaaattcaatgaagcgcgggtaaacggcgggagtaactatgactctcttaag

SEQ ID NO: 38985 - DNA, 250 bp, Homo sapiens
gtagccaaatgcctcgtcatctaattagtgacgcgcatgaatggatgaacgagattcccactgtccctacctactatccagcgaaaccacagccaagggaacgggcttggcggaatcagcggggaaagaagaccctgttgagcttgactctagtctggcacggtgaagagacatgagaggtgtagaataagtgggaggcccccggcgcccccccggtgtccccgcgaggggcccggggcggggtccgccg

SEQ ID NO: 38986 - DNA, 250 bp, Homo sapiens
gcggttccgcgcggcgcctcgcctcggccggcgcctagcagccgacttagaactggtgcggaccaggggaatccgactgtttaattaaaacaaagcatcgcgaaggcccgcggcgggtgttgacgcgatgtgatttctgcccagtgctctgaatgtcaaagtgaagaaattcaatgaagcgcgggtaaacggcgggagtaactatgactctcttaaggtagccaaatgcctcgtcatctaattagtgacg

SEQ ID NO: 38987 - DNA, 250 bp, Homo sapiens
cgcatgaatggatgaacgagattcccactgtccctacctactatccagcgaaaccacagccaagggaacgggcttggcggaatcagcggggaaagaagaccctgttgagcttgactctagtctggcacggtgaagagacatgagaggtgtagaataagtgggaggcccccggcgcccccccggtgtccccgcgaggggcccggggcggggtccgccggccctgcgggccgccggtgaaataccactactc

SEQ ID NO: 38988 - DNA, 250 bp, Homo sapiens
tcccccccgccgggtccgcccccggggccgcggttccgcgcggcgcctcgcctcggccggcgcctagcagccgacttagaactggtgcggaccaggggaatccgactgtttaattaaaacaaagcatcgcgaaggcccgcggcgggtgttgacgcgatgtgatttctgcccagtgctctgaatgtcaaagtgaagaaattcaatgaagcgcgggtaaacggcgggagtaactatgactctcttaaggtag

SEQ ID NO: 38989 - DNA, 250 bp, Homo sapiens
ccaaatgcctcgtcatctaattagtgacgcgcatgaatggatgaacgagattcccactgtccctacctactatccagcgaaaccacagccaagggaacgggcttggcggaatcagcggggaaagaagaccctgttgagcttgactctagtctggcacggtgaagagacatgagaggtgtagaataagtgggaggcccccggcgcccccccggtgtccccgcgaggggcccggggcggggtccgccggccc

SEQ ID NO: 38990 - DNA, 250 bp, Homo sapiens
cggcgcgctcgccggccgaggtgggatcccgaggcctctccagtccgccgagggcgcaccaccggcccgtctcgcccgccgcgccggggaggtggagcacgagcgcacgtgttaggacccgaaagatggtgaactatgcctgggcagggcgaagccagaggaaactctggtggaggtccgtagcggtcctgacgtgcaaatcggtcgtccgacctgggtataggggcgaaagactaatcgaaccatctag

SEQ ID NO: 38991 - DNA, 250 bp, Homo sapiens
tagctggttccctccgaagtttccctcaggatagctggcgctctcgcagacccgacgcacccccgccacgcagttttatccggtaaagcgaatgattagaggtcttggggccgaaacgatctcaacctattctcaaactttaaatgggtaagaagcccggctcgctggcgtggagccgggcgtggaatgcgagtgcctagtgggccacttttggtaagcagaactggcgctgcgggatgaaccgaacgcc

SEQ ID NO: 38992 - DNA, 250 bp, Homo sapiens
gcattcgtattgcgccgctagaggtgaaattcttggaccggcgcaagacggaccagagcgaaagcatttgccaagaatgttttcattaatcaagaacgaaagtcggaggttcgaagacgatcagataccgtcgtagttccgaccataaacgatgccgaccggcgatgcggcggcgttattcccatgacccgccgggcagcttccgggaaaccaaagtctttgggttccggggggagtatggttgcaaagc

SEQ ID NO: 38993 - DNA, 250 bp, Homo sapiens
tgaaacttaaaggaattgacggaagggcaccaccaggagtggagcctgcggcttaatttgactcaacacgggaaacctcacccggcccggacacggacaggattgacagattgatagctctttctcgattccgtgggtggtggtgcatggccgttcttagttggtggagcgatttgtctggttaattccgataacgaacgagactctggcatgctaactagttacgcgacccccgagcggtcggcgtccc

SEQ ID NO: 38994 - DNA, 250 bp, Homo sapiens
tagcagccgacttagaactggtgcggaccaggggaatccgactgtttaattaaaacaaagcatcgcgaaggcccgcggcgggtgttgacgcgatgtgatttctgcccagtgctctgaatgtcaaagtgaagaaattcaatgaagcgcgggtaaacggcgggagtaactatgactctcttaaggtagccaaatgcctcgtcatctaattagtgacgcgcatgaatggatgaacgagattcccactgtccct

SEQ ID NO: 38995 - DNA, 250 bp, Homo sapiens
acctactatccagcgaaaccacagccaagggaacgggcttggcggaatcagcggggaaagaagaccctgttgagcttgactctagtctggcacggtgaagagacatgagaggtgtagaataagtgggaggcccccggcgcccccccggtgtccccgcgaggggcccggggcggggtccgccggccctgcgggccgccggtgaaataccactactctgatcgttttttcactgacccggtgaggcgggggg

SEQ ID NO: 38996 - DNA, 250 bp, Homo sapiens
ccccccgccgggtccgcccccggggccgcggttccgcgcggcgcctcgcctcggccggcgcctagcagccgacttagaactggtgcggaccaggggaatccgactgtttaattaaaacaaagcatcgcgaaggcccgcggcgggtgttgacgcgatgtgatttctgcccagtgctctgaatgtcaaagtgaagaaattcaatgaagcgcgggtaaacggcgggagtaactatgactctcttaaggtagcc

SEQ ID NO: 38997 - DNA, 250 bp, Homo sapiens
aaatgcctcgtcatctaattagtgacgcgcatgaatggatgaacgagattcccactgtccctacctactatccagcgaaaccacagccaagggaacgggcttggcggaatcagcggggaaagaagaccctgttgagcttgactctagtctggcacggtgaagagacatgagaggtgtagaataagtgggaggcccccggcgcccccccggtgtccccgcgaggggcccggggcggggtccgccggccctg

SEQ ID NO: 38998 - DNA, 250 bp, Homo sapiens
gcgcaagacggaccagagcgaaagcatttgccaagaatgttttcattaatcaagaacgaaagtcggaggttcgaagacgatcagataccgtcgtagttccgaccataaacgatgccgaccggcgatgcggcggcgttattcccatgacccgccgggcagcttccgggaaaccaaagtctttgggttccggggggagtatggttgcaaagctgaaacttaaaggaattgacggaagggcaccaccaggagt

SEQ ID NO: 38999 - DNA, 250 bp, Homo sapiens
ggagcctgcggcttaatttgactcaacacgggaaacctcacccggcccggacacggacaggattgacagattgatagctctttctcgattccgtgggtggtggtgcatggccgttcttagttggtggagcgatttgtctggttaattccgataacgaacgagactctggcatgctaactagttacgcgacccccgagcggtcggcgtcccccaacttcttagagggacaagtggcgttcagccacccgag

SEQ ID NO: 39000 - DNA, 250 bp, Homo sapiens
ggccgggcgcgacccgctccggggacagtgccaggtggggagtttgactggggcggtacacctgtcaaacggtaacgcaggtgtcctaaggcgagctcagggaggacagaaacctcccgtggagcagaagggcaaaagctcgcttgatcttgattttcagtacgaatacagaccgtgaaagcggggcctcacgatccttctgaccttttgggttttaagcaggaggtgtcagaaaagttaccacagggat

SEQ ID NO: 39001 - DNA, 250 bp, Homo sapiens
aactggcttgtggcggccaagcgttcatagcgacgtcgctttttgatccttcgatgtcggctcttcctatcattgtgaagcagaattcaccaagcgttggattgttcacccactaatagggaacgtgagctgggtttagaccgtcgtgagacaggttagttttaccctactgatgatgtgttgttgccatggtaatcctgctcagtacgagaggaaccgcaggttcagacatttggtgtatgtgcttggc

SEQ ID NO: 39002 - DNA, 19 bp, Homo sapiens
gtctacggccataccaccc

SEQ ID NO: 39003 - DNA, 102 bp, Homo sapiens
tgaacgcgcccgatctcgtctgatctcggaagctaagcagggtcgggcctggttagtacttggatgggagaccgcctgggaataccgggtgctgtaggcttt

SEQ ID NO: 39004 - DNA, 38 bp, Homo sapiens
atcgcttctcggccttttggctaagatcaagtgtagta

SEQ ID NO: 39005 - DNA, 150 bp, Homo sapiens
tctgttcttatcagtttaatatctgatacgtcctctatccgaggacaatatattaaatggatttttggagcagggagatggaataggagcttgctccgtccactccacgcatcgacctggtattgcagtacctccaggaacggtgcaccc

SEQ ID NO: 39006 - RNA, 21 nt, Homo sapiens
cauaaaguagaaagcacuacu

SEQ ID NO: 39007 - RNA, 23 nt, Homo sapiens
uguaguguuuccuacuuuaugga

SEQ ID NO: 39008 - RNA, 24 nt, Homo sapiens
uuuggcaaugguagaacucacacu

SEQ ID NO: 39009 - RNA, 21 nt, Homo sapiens
ugguucuagacuugccaacua

SEQ ID NO: 39010 - RNA, 22 nt, Homo sapiens
uauggcacugguagaauucacu

SEQ ID NO: 39011 - RNA, 22 nt, Homo sapiens
gugaauuaccgaagggccauaa

SEQ ID NO: 39012 - RNA, 22 nt, Homo sapiens
uggagugugacaaugguguuug

SEQ ID NO: 39013 - RNA, 22 nt, Homo sapiens
aacgccauuaucacacuaaaua

SEQ ID NO: 39014 - RNA, 47 nt, Artificial Sequence
  Description of Artificial Sequence: Synthetic oligonucleotide
gggaaauaagagagaaaagaagaguaagaagaaauauaagagccacc

SEQ ID NO: 39015 - RNA, 110 nt, Artificial Sequence
  Description of Artificial Sequence: Synthetic polynucleotide
ugauaauaggcuggagccucgguggccaugcuucuugccccuugggccuccccccagccccuccuccccuuccugcacccguacccccguggucuuugaauaaagucuga

SEQ ID NO: 39016 - RNA, 47 nt, Artificial Sequence; identical to SEQ ID NO: 39014
  Description of Artificial Sequence: Synthetic oligonucleotide

SEQ ID NO: 39017 - RNA, 110 nt, Artificial Sequence; identical to SEQ ID NO: 39015
  Description of Artificial Sequence: Synthetic polynucleotide

SEQ ID NO: 39018 - RNA, 47 nt, Artificial Sequence; identical to SEQ ID NO: 39014
  Description of Artificial Sequence: Synthetic oligonucleotide

SEQ ID NO: 39019 - RNA, 110 nt, Artificial Sequence; identical to SEQ ID NO: 39015
  Description of Artificial Sequence: Synthetic polynucleotide

SEQ ID NO: 39020 - protein, 4 aa, Artificial Sequence
  Description of Artificial Sequence: Synthetic peptide
GGGS

SEQ ID NO: 39021 - protein, 5 aa, Unknown
  Description of Unknown: Thrombin-sensitive sequence
CPRSC

SEQ ID NO: 39022 - protein, 9 aa, Artificial Sequence
  Description of Artificial Sequence: Synthetic peptide
RRRRRRRRR
